(19) United States
(12) Patent Application Publication
(10) Pub. No.: US 2011/0028531 A1
(43) Pub. Date: Feb. 3, 2011

(54) NOVEL SIRNA COMPOUNDS FOR INHIBITING RTP801

(76) Inventors: Elena Feinstein, Rehovot (IL); Rami Skaliter, Nes Ziona (IL); Hagar Kalinski, Rishon-le-Zion (IL); Igor Mett, Rehovot (IL)

Correspondence Address: COOPER & DUNHAM, LLP, 30 Rockefeller Plaza, 20th Floor, NEW YORK, NY, 10112, US

(21) Appl. No.: 12/736,230

(22) PCT Filed: Mar. 17, 2009
(86) PCT No.: PCT/IL09/00302

§ 371 Date: Oct. 20, 2010

Related U.S. Application Data
(60) Provisional application No. 61/070,181, filed on Mar. 20, 2008.

(51) Int. Cl. A61K 31/713; C07H 21/02; A61P 25/28; A61P 13/12; A61P 11/00; A61P 27/02; A61P 9/10; A61P 27/16; A61P 25/00; A61P 25/16; A61P 11/06; A61P 27/06

(52) U.S. Cl. 514/44 A; 536/24.5

(57) ABSTRACT

The present invention provides chemically modified siRNA compounds that target RTP801 and pharmaceutical compositions comprising same useful for treating microvascular disorders, eye diseases, hearing impairment, neurodegenerative diseases and disorders, spinal cord injury and respiratory conditions.

[0001] This application claims priority from U.S. Provisional Patent Application Ser. No. 61/070,181, which is hereby incorporated by reference in its entirety.

### FIELD OF THE INVENTION

[0002] The present invention relates to novel siRNA oligonucleotides and to chemically modified siRNA compounds which inhibit RTP801 and to the use of the compounds to treat respiratory disorders (including pulmonary disorders), eye diseases and conditions, hearing impairments (including hearing loss), neurodegenerative disorders, spinal cord injury, microvascular disorders, angiogenesis- and apoptosis-related conditions.

### BACKGROUND OF THE INVENTION

### RTP801

[0003] The RTP801 gene was first reported by the assignee of the instant application. U.S. Pat. Nos. 6,455,674, 6,555,667, and 6,740,738, and related patents to the assignee of the instant application and hereby incorporated by reference in their entirety, disclose the RTP801 polynucleotide and polypeptide, and antibodies directed toward the polypeptide. RTP801 represents a unique gene target for hypoxia-inducible factor-1 (HIF-1) that may regulate hypoxia-induced pathogenesis independently of growth factors such as VEGF. PCT Patent Application Nos. PCT/US2005/029236, PCT/US2007/001468 and PCT/US2008/002483, to the assignee of the instant application and hereby incorporated by reference in their entirety, relate to compounds including siRNA, for inhibition of RTP801.

[0004] The assignee of the instant application has discovered a similar, albeit distinct, gene termed RTP801L (for RTP801-like) which can be used in combination therapies with RTP801 (see below). For further information concerning RTP801L see PCT Publication No. WO 2007/141796, assigned to the assignee of the instant application, which is hereby incorporated by reference in its entirety.

[0005] The following patents and patent applications give aspects of background information: WO 2001/070979, US 2003108871, US 2002119463, WO 2004/018999, EP 1394274, WO 2002/101075, WO 2003/010205 and WO 2002/046465. The following publications give background information: Shoshani, et al. Mol. Cel. Biol., April 2002, p. 2283-2293; Brafman, et al. Invest Opthalmol Vis Sci. 2004. 45(10):3796-805; Ellisen, et al. Molecular Cell, 2002. 10:995-1005; and Richard et al. J. Biol. Chem. 2000, 275(35): 26765-71.

siRNA and RNA Interference

[0006] RNA interference (RNAi) is a phenomenon involving double-stranded (ds) RNA-dependent gene-specific posttranscriptional silencing. Initial attempts to study this phenomenon and to manipulate mammalian cells experimentally were frustrated by an active, non-specific antiviral defense mechanism which was activated in response to long dsRNA molecules (Gil et al., Apoptosis, 2000. 5:107-114). Later, it was discovered that synthetic duplexes of 21 nucleotide RNAs could mediate gene specific RNAi in mammalian cells, without stimulating the generic antiviral defense mechanisms (Elbashir et al. Nature 2001, 411:494-498 and Caplen et al. PNAS 2001, 98:9742-9747). As a result, small interfering RNAs (siRNAs), which are short double-stranded RNAs, have been widely used to inhibit gene expression and understand gene function.

[0007] RNA interference (RNAi) is mediated by small interfering RNAs (siRNAs) (Fire et al, Nature 1998, 391:806) or microRNAs (miRNAs) (Ambros V. Nature 2004, 431:350-355 and Bartel D P. Cell. 2004 116(2):281-97). The corresponding process in plants is commonly referred to as specific post-transcriptional gene silencing and as quelling in fungi.

[0008] A siRNA is a double-stranded RNA (dsRNA) which down-regulates or silences (i.e. fully or partially inhibits) the expression of an endogenous or exogenous gene/mRNA. RNA interference is based on the ability of certain dsRNA species to enter a specific protein complex, where they are then targeted to complementary cellular RNA (i.e. mRNA), which they specifically degrade or cleave. Thus, the RNA interference response features an endonuclease complex containing siRNA, commonly referred to as an RNA-induced silencing complex (RISC), which mediates cleavage of single-stranded RNA having a sequence complementary to the antisense strand of the siRNA duplex. Cleavage of the target RNA may take place in the middle of the region complementary to the antisense strand of the siRNA duplex (Elbashir, et al., Genes Dev., 2001, 15:188). In more detail, longer dsRNAs are digested into short (17-29 bp) dsRNA fragments (also referred to as short inhibitory RNAs or “siRNAs”) by type III RNAses (DICER, DROSHA, etc., see Bernstein et al., Nature, 2001, 409:363-6 and Lee et al., Nature, 2003, 425:415-9). The RISC protein complex recognizes these fragments and complementary mRNA. The whole process is culminated by endonuclease cleavage of target mRNA (McManus and Sharp, Nature Rev Genet, 2002, 3:737-47; Paddison and Hannon, Curr Opin Mol. Ther. 2003, 5(3): 217-24). For additional information on these terms and proposed mechanisms, see for example, Bernstein, et al., RNA. 2001, 7(11):1509-21; Nishikura, Cell. 2001, 107(4):415-8 and PCT Publication No. WO 01/36646.

[0009] Studies have revealed that siRNA can be effective in vivo in mammals including humans. Specifically, Bitko et al., showed that specific siRNAs directed against the respiratory syncytial virus (RSV) nucleocapsid N gene are effective in treating mice when administered intranasally (Nat. Med. 2005, 11(1):50-55). For reviews of therapeutic applications of siRNAs see for example Batik (Mol. Med. 2005, 83: 764-773) and Chakraborty (Current Drug Targets 2007 8(3):469-82). In addition, clinical studies with short siRNAs that target the VEGF receptor 1 (VEGFR1) to treat age-related macular degeneration (AMD) have been conducted in human patients (Kaiser, Am J. Opthalmol. 2006 142(4):660-8). Further information on the use of siRNA as therapeutic agents is found in Durcan, 2008. Mol. Pharma. 5(4):559-566; Kim and Rossi, 2008. BioTechniques 44:613-616; Grimm and Kay, 2007, JCI, 117(12):3633-41.

Chemically Modified siRNA

[0010] The selection and synthesis of siRNA corresponding to known genes has been widely reported; (see for example Ui-Tei et al., 2006. J Biomed Biotechnol. 2006:65052; Chalk et al., 2004. BBRC. 319(1): 264-74; Sioud & Leirdal, 2004. Met. Mol. Biol. 252:457-69; Levenkova et al., 2004, Bioinform. 20(3):430-2; Ui-Tei et al., 2004. NAR 32(3):936-48).

[0011] Examples for the use of, and production of, modified siRNA are found in Braasch et al., 2003. Biochem., 42(26):7967-75; Chiu et al., 2003, RNA, 9(9):1034-48; PCT publications WO 2004/015107 (atugen AG) and WO 02/44321 (Tuschl et al). U.S. Pat. Nos. 5,898,031 and 6,107,094 teach chemically modified oligomers. U.S. Pat. No. 7,452,987 relates to oligomeric compounds having alternating unmodified and 2′ sugar modified ribonucleotides. US patent publication No. 2005/0042647 describes dsRNA compounds having chemically modified internucleoside linkages.

[0012] The inclusion of a 5′-phosphate moiety was shown to enhance activity of siRNAs in Drosophila embryos (Boutla, et al., 2001, Curr. Biol. 11:1776-1780) and is required for siRNA function in human HeLa cells (Schwarz et al., 2002, Mol. Cell, 10:537-548).

[0013] Amarzguoui et al., (2003, NAR, 31(2):589-595) showed that siRNA activity depended on the positioning of the 2′-O-methyl modifications. Holen et al (2003, NAR, 31(9):2401-2407) report that an siRNA having small numbers of 2′-O-methyl modified nucleosides showed good activity compared to wild type but that the activity decreased as the numbers of 2′-O-methyl modified nucleosides was increased. Chiu and Rana (2003, RNA, 9:1034-1048) teach that incorporation of 2′-O-methyl modified nucleosides in the sense or antisense strand (fully modified strands) severely reduced siRNA activity relative to unmodified siRNA. The placement of a 2′-O-methyl group at the 5′-terminus on the antisense strand was reported to severely limit activity whereas placement at the 3′-terminus of the antisense and at both termini of the sense strand was tolerated (Czauderna et al., 2003, NAR, 31(11), 2705-2716).

[0014] PCT Patent Application Nos. PCT/IL2008/000248 and PCT/IL2008/001197, assigned to the assignee of the present invention, and hereby incorporated by reference in their entirety, disclose motifs useful in the preparation of chemically modified siRNA compounds.

[0015] Respiratory disorders of all types (including pulmonary disorders), eye diseases and conditions, hearing impairments (including hearing loss), microvascular disorders, neurodegenerative diseases and disorders, spinal cord injury, angiogenesis- and apoptosis-related conditions affect millions of people worldwide. There is a need to identify new drugs and new drug targets useful in treating subjects suffering from or susceptible to these diseases and disorders.

[0016] Stable and active siRNA compounds which inhibit the RTP801 gene and that are useful in treating the above mentioned diseases and disorders would be of great therapeutic value.

### SUMMARY OF THE INVENTION

[0017] The present invention provides, in one aspect, novel double stranded chemically modified oligonucleotides that inhibit or reduce expression of the RTP801 target gene. The oligonucleotides are useful in the preparation of pharmaceutical compositions for treating subjects suffering from microvascular disorders, eye diseases and conditions (e.g. macular degeneration), hearing impairments (including hearing loss), respiratory disorders, neurodegenerative disorders, spinal cord injury, angiogenesis- and apoptosis-related conditions.

[0018] In one aspect the present invention provides novel siRNA molecules, which inhibit the RTP801 gene and can be used to treat various diseases and indications.

[0019] Accordingly, in one aspect the present invention provides a siRNA compound having the following structure:

| | |
|---|---|
| 5′ (N)ₓ-Z 3′ | (antisense strand) |
| 3′ Z′-(N′)_{y}-z″ 5′ | (sense strand) |

wherein each of N and N′ is a ribonucleotide which may be unmodified or modified, or an unconventional moiety;
wherein each of (N)x and (N′)y is an oligonucleotide in which each consecutive N or N′ is joined to the next N or N′ by a covalent bond;
wherein Z and Z′ may be present or absent, but if present is independently 1-5 consecutive nucleotides covalently attached at the 3′ terminus of the strand in which it is present;
wherein z″ may be present or absent, but if present is a capping moiety covalently attached at the 5′ terminus of (N′)y;
each of x and y is independently an integer between 18 and 40;
wherein the sequence of (N′)y is substantially complementary to the sequence of (N)x;
and wherein (N)x comprises an antisense that is substantially complementary to the RTP801 mRNA.

[0020] In some embodiments the compound comprises a phosphodiester bond. In preferred embodiments (N)x comprises modified and unmodified ribonucleotides, each modified ribonucleotide having a 2′-O-methyl on its sugar, wherein N at the 3′ terminus of (N)x is a modified ribonucleotide, (N)x comprises at least five alternating modified ribonucleotides beginning at the 3′ end and at least nine modified ribonucleotides in total and each remaining N is an unmodified ribonucleotide and (N′)y comprises at least one mirror nucleotide, or a nucleotide joined to an adjacent nucleotide by a 2′-5′ internucleotide phosphate bond.

[0021] In additional embodiments (N)x comprises modified ribonucleotides in alternating positions wherein each N at the 5′ and 3′ termini are modified in their sugar residues and the middle ribonucleotide is not modified, e.g. ribonucleotide in position 10 in a 19-mer strand.

[0022] For all the structures, in some embodiments the covalent bond joining each consecutive N or N′ is a phosphodiester bond. In various embodiments all the covalent bonds are phosphodiester bonds.

[0023] In various embodiments x=y and each of x and y is 19, 20, 21, 22 or 23. In some embodiments x=y=21. In other embodiments x=y=19.

[0024] In one embodiment of the above structure, the compound comprises at least one mirror nucleotide at one terminus or both termini in (N′)y. In various embodiments the compound comprises two consecutive mirror nucleotides, one at the 3′ penultimate position and one at the 3′ terminus in (N′)y. In one preferred embodiment x=y=19 and (N′)y comprises an L-deoxyribonucleotide at position 18.

[0025] In some embodiments the mirror nucleotide is selected from an L-ribonucleotide and an L-deoxyribonucleotide. In various embodiments the mirror nucleotide is an L-deoxyribonucleotide. In some embodiments y=19 and (N′)y, consists of unmodified ribonucleotides at positions 1-17 and 19 and one L-DNA at the 3′ penultimate position (position 18). In other embodiments y=19 and (N′)y consists of unmodified ribonucleotides at position 1-16 and 19 and two consecutive L-DNA at the 3′ penultimate position (positions 17 and 18).

[0026] In some embodiments (N)x and its corresponding sense strand (N′)y are selected from any one of the oligonucleotide pairs shown in Tables A-I, set forth in SEQ ID NOS:3-3624. In certain embodiments the nucleotide sequence of (N)x is set forth in any one of SEQ ID NO:16 and SEQ ID NO:1243.

[0027] In some embodiments in (N)x the ribonucleotides alternate between 2′-O-Methyl sugar modified ribonucleotides and unmodified ribonucleotides and the ribonucleotide located at the middle of (N)x being unmodified.

[0028] In some embodiments (N)x comprises at least five alternating unmodified ribonucleotides and 2′O methyl sugar modified ribonucleotides beginning at the 3′ end and at least nine 2′O methyl sugar modified ribonucleotides in total and each remaining N is an unmodified ribonucleotide.

[0029] In some embodiments in (N)x 1-5 consecutive N at the 5′ terminus are 2′O Methyl sugar modified ribonucleotides and the remainder of the N are unmodified ribonucleotides.

[0030] In another embodiment of the above structure, (N′)y further comprises one or more nucleotides containing a sugar moiety modified with an extra bridge at one or both termini. Non-limiting examples of such nucleotides, also referred to herein as bicyclic nucleotides, are locked nucleic acid (LNA) and ethylene-bridged nucleic acid (ENA).

[0031] In another embodiment of the above structure, (N′)y comprises at least two consecutive nucleotide joined together to the next nucleotide by a 2′-5′ phosphodiester bond at one or both termini. In certain preferred embodiments in (N′)y the 3′ penultimate nucleotide is linked to the 3′ terminal nucleotide with a 2′-5′ phosphodiester bridge.

[0032] In certain preferred embodiments the compound of the invention is a blunt-ended (z″, Z and Z′ are absent), double stranded oligonucleotide structure, x=y and x=19 or 23, wherein (N′)y comprises unmodified ribonucleotides in which three consecutive nucleotides at the 3′ terminus are joined together by two 2′-5′ phosphodiester bonds; and an antisense strand (AS) of alternating unmodified and 2′-O methyl sugar-modified ribonucleotides.

[0033] In some embodiments, neither (N)x nor (N′)y are phosphorylated at the 3′ and 5′ termini. In other embodiments either or both (N)x and (N′)y are phosphorylated at the 3′ termini.

[0034] In certain embodiments for all the above-mentioned structures, the compound is blunt ended, for example wherein both Z and Z′ are absent. In an alternative embodiment, the compound comprises at least one 3′ overhang and or a 5′ capping moiety at the 5′ terminus of (N′)y, wherein at least one of Z or Z′ or z″ is present. Z, Z′ and z″ are independently one or more covalently linked modified or non-modified nucleotides, for example inverted dT or dA; dT, LNA, mirror nucleotide and the like. In some embodiments each of Z and Z′ are independently selected from dT and dTdT. In certain specific embodiments Z and Z′ are absent, z″ is present and consists of inverted deoxyabasic moiety.

[0035] In some embodiments the siRNA sense and antisense oligonucleotides are selected from sense and corresponding antisense oligonucleotides listed in any one of Tables A-I, set forth in any one of SEQ ID NOS:3-3624.

[0036] In a second aspect the present invention provides a pharmaceutical composition comprising one or more compounds of the present invention, in an amount effective to inhibit target gene expression, and a pharmaceutically acceptable carrier wherein the target gene is RTP801.

[0037] In another aspect, the present invention relates to a method for the treatment of a subject in need of treatment for a disease or disorder or symptom or condition associated with the disease or disorder, associated with the expression of RTP801 comprising administering to the subject an amount of an siRNA which reduces or inhibits expression of RTP801. In preferred embodiments the siRNA compound is chemically modified according to the embodiments of the present invention.

[0038] In some embodiments the present invention provides a method of treating a subject suffering from, inter alia, a microvascular disorder, an eye disease or disorder, a hearing impairment (including hearing loss), a respiratory (including pulmonary) disorder, a neurodegenerative disease or disorder, a spinal cord injury, angiogenesis- and apoptosis-related conditions comprising administering to the subject a pharmaceutical composition comprising at least one RTP801 inhibitor.

[0039] In one embodiment the respiratory disorder is chronic obstructive pulmonary disease (COPD). Thus, the present invention provides a method of treating a subject suffering from COPD, comprising administering to the subject a pharmaceutical composition comprising a therapeutically effective amount of at least one chemically modified siRNA which inhibits the expression of the RTP801 gene. In certain embodiments inhibition of RTP801 gene by at least one chemically modified siRNA molecule of the invention is effective in promoting recovery in a subject suffering from a respiratory disorder.

[0040] In another embodiment the eye disorder is macular degeneration. Thus, the present invention provides a method of treating a subject suffering from macular degeneration, comprising administering to the subject a pharmaceutical composition comprising a therapeutically effective amount of at least one chemically modified siRNA which inhibits the expression of the RTP801 gene. In certain embodiments inhibition of RTP801 gene by at least one chemically modified siRNA molecule of the invention is effective in promoting recovery in a subject suffering from macular degeneration. In one embodiment the macular degeneration is age related macular degeneration (AMD).

[0041] In another embodiment the present invention provides a method of treating a subject suffering from a microvascular disorder, comprising administering to the subject a pharmaceutical composition comprising a therapeutically effective amount of at least one chemically modified siRNA which inhibits the expression of the RTP801 gene. In certain embodiments inhibition of RTP801 gene by at least one chemically modified siRNA molecule of the invention is effective in promoting recovery in a subject suffering from a microvascular disorder. In one embodiment the microvascular disorder is diabetic retinopathy.

[0042] In another embodiment the present invention provides a method of treating a subject suffering from a hearing impairment, comprising administering to the subject a pharmaceutical composition comprising a therapeutically effective amount of at least one chemically modified siRNA which inhibits the expression of the RTP801 gene. In certain embodiments inhibition of RTP801 gene by at least one chemically modified siRNA molecule of the invention is effective in promoting recovery in a subject suffering from a hearing impairment. In one embodiment the hearing impairment is hearing loss.

[0043] In a further embodiment the present invention provides a method of treating a subject suffering from a spinal cord injury, comprising administering to the subject a pharmaceutical composition comprising a therapeutically effective amount of at least one chemically modified siRNA which inhibits the expression of the RTP801 gene. In certain embodiments inhibition of RTP801 gene by at least one chemically modified siRNA molecule of the invention is effective in promoting recovery in a subject suffering from a spinal cord injury.

[0044] In a further embodiment the present invention provides a method of treating a subject suffering from a neurodegenerative disease or disorder, comprising administering to the subject a pharmaceutical composition comprising a therapeutically effective amount of at least one chemically modified siRNA which inhibits the expression of the RTP801 gene. In certain embodiments inhibition of RTP801 gene by at least one chemically modified siRNA molecule of the invention is effective in stabilizing cognitive function at the level existing at time of diagnosis in a subject suffering from a neurodegenerative disease or disorder. In certain embodiments inhibition of RTP801 gene by at least one chemically modified siRNA molecule of the invention is effective in stabilizing motor function at the level existing at time of diagnosis in a subject suffering from a neurodegenerative disease or disorder. In certain embodiments inhibition of RTP801 gene by at least one chemically modified siRNA molecule of the invention is effective in promoting recovery in a subject suffering from a neurodegenerative disease or disorder. In certain embodiments inhibition of RTP801 gene by at least one chemically modified siRNA molecule of the invention is effective in slowing the progress of neurodegenerative disease or disorder in a subject suffering from a neurodegenerative disease or disorder.

[0045] In a further embodiment the present invention provides a method of treating a subject suffering from an angiogenesis-related condition, comprising administering to the subject a pharmaceutical composition comprising a therapeutically effective amount of at least one chemically modified siRNA which inhibits the expression of the RTP801 gene. In certain embodiments inhibition of RTP801 gene by at least one chemically modified siRNA molecule of the invention is effective in promoting recovery in a subject suffering from an angiogenesis-related condition.

[0046] In a further embodiment the present invention provides a method of treating a subject suffering from an apoptosis-related condition, comprising administering to the subject a pharmaceutical composition comprising a therapeutically effective amount of at least one chemically modified siRNA which inhibits the expression of the RTP801 gene. In certain embodiments inhibition of RTP801 gene by at least one chemically modified siRNA molecule of the invention is effective in promoting recovery in a subject suffering from an apoptosis-related condition.

[0047] The present invention provides novel structures of double stranded chemically modified oligonucleotides, having advantageous properties and which are applicable to siRNA to any target sequence, particularly the mRNA sequences of the RTP801 gene, to down-regulate the expression of the RTP801 gene by the mechanism of RNA interference. The invention also provides a pharmaceutical composition comprising at least one chemically modified siRNA molecule of the invention and methods of using the same in therapeutic applications.

[0048] The present invention explicitly excludes known chemically modified siRNA compounds.

[0049] The preferred methods, materials, and examples that will now be described are illustrative only and are not intended to be limiting; materials and methods similar or equivalent to those described herein can be used in practice or testing of the invention. Other features and advantages of the invention will be apparent from the following detailed description, and from the claims.

### DETAILED DESCRIPTION OF THE INVENTION

[0050] The present invention, in some of its embodiments, provides chemically modified siRNA compounds, pharmaceutical compositions comprising at least one compound of the invention and methods for alleviation or reduction of the symptoms and signs associated with eye diseases, respiratory disorders, neurodegenerative disorders, spinal cord injury, hearing impairments and microvascular disorders, inter alia.

[0051] Without being bound by theory, the inventors of the present invention have found that RTP801 is involved in various disease states and disorders including, without being limited to, microvascular disorders, eye diseases, neurodegenerative disease and disorders, respiratory disorders, hearing impairments, angiogenesis- and apoptosis-related conditions and spinal cord injury and disease, and it would be beneficial to inhibit RTP801 in order to treat any of the above mentioned diseases and disorders. Methods, siRNA molecules and compositions which inhibit RTP801 are discussed herein at length, and any of said molecules and/or compositions may be beneficially employed in the treatment of a subject suffering from or susceptible to any of said conditions.

[0052] Accordingly, in certain aspects the present invention provides chemically modified siRNA compounds and pharmaceutical compositions comprising same useful in inhibiting expression of the RTP801 gene in vivo.

[0053] In another aspect, the present invention provides a method of treating a subject suffering from or susceptible to a microvascular disorder, eye disease or disorder, hearing impairment (including hearing loss), a respiratory (including pulmonary) disorder, neurodegenerative disease or disorder, spinal cord injury, angiogenesis- and apoptosis-related conditions, comprising administering to the subject a pharmaceutical composition comprising at least one chemically modified small interfering RNA (i.e., siRNA) of the invention that is targeted to a RTP801 mRNA and hybridize to it, in an amount sufficient to down-regulate expression of RTP801 gene by an RNA interference mechanism.

[0054] In certain embodiments, the subject compounds are useful in inhibiting expression of the RTP801 gene for treatment of respiratory disorders, microvascular disorders or eye disorders. Particular diseases and conditions to be treated are ARDS; COPD; ALI; Emphysema; Diabetic Neuropathy, nephropathy and retinopathy; DME and other diabetic conditions; Glaucoma; AMD; BMT retinopathy; ischemic conditions including stroke; OIS; neurodegenerative disorders such as Parkinson's, Alzheimer's, ALS; kidney disorders: ARF, DGF, transplant rejection; hearing disorders; spinal cord injuries; oral mucositis; dry eye syndrome and pressure sores.

[0055] In various embodiments the present invention provides a method of treating a subject suffering from a microvascular disorder, an eye disease or a respiratory disorder, comprising administering to the subject a pharmaceutical composition comprising at least one chemically modified siRNA molecule according to the present invention in a therapeutically effective amount so as to thereby treat the subject.

[0056] In various embodiments the method comprises administering to the subject a pharmaceutical composition comprising a therapeutically effective dose of at least one chemically modified siRNA molecule according to the present invention which targets the RTP801 gene in a dosage and over a period of time so as to thereby treat the patient.

[0057] The invention further provides a method of treating a subject suffering from a microvascular disorder, an eye disease, a neurodegenerative disease, spinal cord injury, hearing impairment or a respiratory disorder, comprising administering to the subject a pharmaceutical composition comprising at least one chemically modified siRNA molecule according to the present invention, in a dosage and over a period of time sufficient to promote recovery of the subject. The eye disease include macular degeneration such as age-related macular degeneration (AMD), inter alia. The microvascular disorder includes diabetic retinopathy and acute renal failure, inter alia. The respiratory disorder includes chronic obstructive pulmonary disease (COPD), emphysema, chronic bronchitis, asthma and lung cancer, inter alia. The neurodegenerative disorder includes Alzheimer's disease, Parkinson's disease, ALS, inter alia. In various embodiments the chemically modified siRNA compounds of the invention comprise sense and antisense oligonucleotides that are selected from sense and corresponding antisense oligonucleotides presented in any one of Tables A-I, set forth in any one of SEQ ID NOS:3-3624.

[0058] Accordingly, the present invention further provides a method of treating a subject suffering from or susceptible to macular degeneration comprising administering to the subject a pharmaceutical composition comprising a therapeutically effective amount of at least one chemically modified siRNA according to the present invention, wherein the chemically modified siRNA attenuates expression of the RTP801 gene so as to thereby treat the patient. In various embodiments the at least one siRNA comprises consecutive nucleotides having a sequence identical to any one of the sequences set forth in Tables A-I (SEQ ID NOs:3-3624).

[0059] The present invention further provides a method of treating a subject suffering from or susceptible to COPD, comprising administering to the subject a pharmaceutical composition comprising a therapeutically effective amount of at least one chemically modified siRNA according to the present invention, wherein the chemically modified siRNA attenuates expression of the RTP801 gene so as to thereby treat the patient. In various embodiments the at least one siRNA sense and antisense strands are selected form any one of the sequencers in Tables A-I, set forth SEQ ID NOs:3-3624.

[0060] The present invention further provides a method of treating a subject suffering from or susceptible diabetic retinopathy, comprising administering to the subject a pharmaceutical composition comprising a therapeutically effective amount of at least one chemically modified siRNA according to the present invention, wherein the chemically modified siRNA attenuates expression of the RTP801 gene so as to thereby treat the patient. In various embodiments the at least one siRNA sense and antisense strands are selected form any one of the sequencers in Tables A-I, set forth SEQ ID NOs:3-3624.

[0061] In various embodiments the neurodegenerative disorder is selected from neurodegenerative conditions causing problems with movements, such as ataxia; and conditions affecting memory and related to dementia. In various embodiments the neurodegenerative disorder is selected from Parkinson's disease, ALS (Lou Gehrig's Disease), Alzheimer's disease, Lewy body dementia, Huntington's disease and any other disease-induced dementia (such as HIV-associated dementia for example).

[0062] In further embodiments, this invention provides novel chemically modified siRNA compounds, pharmaceutical compositions comprising them and methods for alleviation or reduction of symptoms and signs associated with neurological disorders arising from ischemic or hypoxic conditions. Non-limiting examples of such conditions are hypertension, hypertensive cerebral vascular disease, a constriction or obstruction of a blood vessel—as occurs in the case of a thrombus or embolus, angioma, blood dyscrasias, any form of compromised cardiac function including cardiac arrest or failure, systemic hypotension. In one embodiment the neurological disorder is stroke. In another embodiment the neurological disorder is epilepsy.

[0063] Lists of preferred siRNA compounds are provided in Tables A-I. The separate lists of 19-mer, 21-mer and 23-mer siRNAs are prioritized based on their score according to a proprietary algorithm as the best sequences for targeting the human gene expression.

[0064] Methods, molecules and compositions, which inhibit target genes are discussed herein at length, and any of said molecules and/or compositions are beneficially employed in the treatment of a patient suffering from any of said conditions. Tables A, B, D, E and I set forth 19-mer oligomers. Tables C and F set forth 21-mer oligomers. Tables G and H set forth 23-mer oligomers.

### DEFINITIONS

[0065] For convenience certain terms employed in the specification, examples and claims are described herein.

[0066] It is to be noted that, as used herein, the singular forms “a”, “an” and “the” include plural forms unless the content clearly dictates otherwise.

[0067] Where aspects or embodiments of the invention are described in terms of Markush groups or other grouping of alternatives, those skilled in the art will recognize that the invention is also thereby described in terms of any individual member or subgroup of members of the group.

[0068] An “inhibitor” is a compound, which is capable of reducing (partially or fully) the expression of a gene or the activity of the product of such gene to an extent sufficient to achieve a desired biological or physiological effect. The term “inhibitor” as used herein refers to a siRNA inhibitor.

[0069] A “siRNA inhibitor” is a compound which is capable of reducing the expression of a gene or the activity of the product of such gene to an extent sufficient to achieve a desired biological or physiological effect. The term “siRNA inhibitor” as used herein refers to one or more of a siRNA, shRNA, synthetic shRNA; miRNA. Inhibition may also be referred to as down-regulation or, for RNAi, silencing.

[0070] The term “inhibit” as used herein refers to reducing the expression of a gene or the activity of the product of such gene to an extent sufficient to achieve a desired biological or physiological effect. Inhibition is either complete or partial.

[0071] As used herein, the term “inhibition” of a target gene means inhibition of the gene expression (transcription or translation) or polypeptide activity of a target gene wherein the target gene is RTP801 or variants thereof. The polynucleotide sequence of the target mRNA sequence, or the target gene having a mRNA sequence refer to the mRNA sequence or any homologous sequences thereof preferably having at least 70% identity, more preferably 80% identity, even more preferably 90% or 95% identity to the mRNA of RTP801. Therefore, polynucleotide sequences derived from the RTP801 mRNA which have undergone mutations, alterations or modifications as described herein are encompassed in the present invention. The terms “mRNA polynucleotide sequence”, “mRNA sequence” and “mRNA” are used interchangeably.

[0072] As used herein, the terms “polynucleotide” and “nucleic acid” may be used interchangeably and refer to nucleotide sequences comprising deoxyribonucleic acid (DNA), and ribonucleic acid (RNA). The terms are to be understood to include, as equivalents, analogs of either RNA or DNA made from nucleotide analogs. Throughout this application, mRNA sequences are set forth as representing the corresponding genes.

[0073] “Oligonucleotide” or “oligomer” refers to a deoxyribonucleotide or ribonucleotide sequence from about 2 to about 50 nucleotides. Each DNA or RNA nucleotide may be independently natural or synthetic, and or modified or unmodified. Modifications include changes to the sugar moiety, the base moiety and or the linkages between nucleotides in the oligonucleotide. The compounds of the present invention encompass molecules comprising deoxyribonucleotides, ribonucleotides, modified deoxyribonucleotides, modified ribonucleotides and combinations thereof.

[0074] Substantially complementary refers to complementarily of greater than about 84%, to another sequence. For example in a duplex region consisting of 19 base pairs one mismatch results in 94.7% complementarity, two mismatches results in about 89.5% complementarity and 3 mismatches results in about 84.2% complementarity, rendering the duplex region substantially complementary. Accordingly substantially identical refers to identity of greater than about 84%, to another sequence.

[0075] “Nucleotide” is meant to encompass deoxyribonucleotides and ribonucleotides, which may be natural or synthetic, and or modified or unmodified. Modifications include changes to the sugar moiety, the base moiety and or the linkages between ribonucleotides in the oligoribonucleotide. As used herein, the term “ribonucleotide” encompasses natural and synthetic, unmodified and modified ribonucleotides. Modifications include changes to the sugar moiety, to the base moiety and/or to the linkages between ribonucleotides in the oligonucleotide.

[0076] The nucleotides can be selected from naturally occurring or synthetic modified bases. Naturally occurring bases include adenine, guanine, cytosine, thymine and uracil.

[0077] Modified bases of nucleotides include inosine, xanthine, hypoxanthine, 2-aminoadenine, 6-methyl, 2-propyl and other alkyl adenines, 5-halo uracil, 5-halo cytosine, 6-aza cytosine and 6-aza thymine, pseudo uracil, 4-thiuracil, 8-halo adenine, 8-aminoadenine, 8-thiol adenine, 8-thiolalkyl adenines, 8-hydroxyl adenine and other 8-substituted adenines, 8-halo guanines, 8-amino guanine, 8-thiol guanine, 8-thioalkyl guanines, 8-hydroxyl guanine and other substituted guanines, other aza and deaza adenines, other aza and deaza guanines, 5-trifluoromethyl uracil and 5-trifluoro cytosine. In some embodiments one or more nucleotides in an oligomer is substituted with inosine.

[0078] According to some embodiments the present invention provides inhibitory oligonucleotide compounds comprising unmodified and modified nucleotides and or unconventional moieties. The compound comprises at least one modified nucleotide selected from the group consisting of a sugar modification, a base modification and an internucleotide linkage modification and may contain DNA, and modified nucleotides such as LNA (locked nucleic acid), ENA (ethylene-bridged nucleic acid), PNA (peptide nucleic acid), arabinoside, phosphonocarboxylate or phosphinocarboxylate nucleotide (PACE nucleotide), mirror nucleotide, or nucleotides with a 6 carbon sugar.

[0079] All analogs of, or modifications to, a nucleotide/oligonucleotide are employed with the present invention, provided that said analog or modification does not substantially adversely affect the function of the nucleotide/oligonucleotide. Acceptable modifications include modifications of the sugar moiety, modifications of the base moiety, modifications in the internucleotide linkages and combinations thereof.

[0080] A sugar modification includes a modification on the 2′ moiety of the sugar residue and encompasses amino, fluoro, alkoxy e.g. methoxy, alkyl, amino, fluoro, chloro, bromo, CN, CF, imidazole, carboxylate, thioate, C₁ to C₁₀ lower alkyl, substituted lower alkyl, alkaryl or aralkyl, OCF₃, OCN, O-, S-, or N-alkyl; O-, S, or N-alkenyl; SOCH₃; SO₂CH₃; ONO₂; NO₂, N₃; heterozycloalkyl; heterozycloalkaryl; aminoalkylamino; polyalkylamino or substituted silyl, as, among others, described in European patents EP 0 586 520 B1 or EP 0 618 925 B1.

[0081] In one embodiment the siRNA compound comprises at least one ribonucleotide comprising a 2′ modification on the sugar moiety (“2′ sugar modification”). In certain embodiments the compound comprises 2′O-alkyl or 2′-fluoro or 2′O-allyl or any other 2′ modification, optionally on alternate positions. Other stabilizing modifications are also possible (e.g. terminal modifications). In some embodiments a preferred 2′O-alkyl is 2′O-methyl (methoxy) sugar modification.

[0082] In some embodiments the backbone of the oligonucleotides is modified and comprises phosphate-D-ribose entities but may also contain thiophosphate-D-ribose entities, triester, thioate, 2′-5′ bridged backbone (also may be referred to as 5′-2′), PACE and the like.

[0083] As used herein, the terms “non-pairing nucleotide analog” means a nucleotide analog which comprises a non-base pairing moiety including but not limited to: 6 des amino adenosine (Nebularine), 4-Me-indole, 3-nitropyrrole, 5-nitroindole, Ds, Pa, N3-Me ribo U, N3-Me riboT, N3-Me dC, N3-Me-dT, N1-Me-dG, N1-Me-dA, N3-ethyl-dC, N3-Me dC. In some embodiments the non-base pairing nucleotide analog is a ribonucleotide. In other embodiments it is a deoxyribonucleotide. In addition, analogues of polynucleotides may be prepared wherein the structure of one or more nucleotide is fundamentally altered and better suited as therapeutic or experimental reagents. An example of a nucleotide analogue is a peptide nucleic acid (PNA) wherein the deoxyribose (or ribose) phosphate backbone in DNA (or RNA is replaced with a polyimide backbone which is similar to that found in peptides. PNA analogues have been shown to be resistant to enzymatic degradation and to have enhanced stability in vivo and in vitro. Other modifications that can be made to oligonucleotides include polymer backbones, cyclic backbones, acyclic backbones, thiophosphate-D-ribose backbones, triester backbones, thioate backbones, 2′-5′ bridged backbone, artificial nucleic acids, morpholino nucleic acids, glycol nucleic acid (GNA), threose nucleic acid (TNA), arabinoside, and mirror nucleoside (for example, beta-L-deoxyribonucleoside instead of beta-D-deoxyribonucleoside). Examples of siRNA compounds comprising LNA nucleotides are disclosed in Elmen et al., (NAR 2005, 33(1):439-447).

[0084] The compounds of the present invention can be synthesized using one or more inverted nucleotides, for example inverted thymidine or inverted adenine (see, for example, Takei, et al., 2002, JBC 277(26):23800-06).

[0085] Other modifications include terminal modifications on the 5′ and/or 3′ part of the oligonucleotides and are also known as capping moieties. Such terminal modifications are selected from a nucleotide, a modified nucleotide, a lipid, a peptide, a sugar and inverted abasic moiety.

[0086] What is sometimes referred to in the present invention as an “abasic nucleotide” or “abasic nucleotide analog” is more properly referred to as a pseudo-nucleotide or an unconventional moiety. A nucleotide is a monomeric unit of nucleic acid, consisting of a ribose or deoxyribose sugar, a phosphate, and a base (adenine, guanine, thymine, or cytosine in DNA; adenine, guanine, uracil, or cytosine in RNA). A modified nucleotide comprises a modification in one or more of the sugar, phosphate and or base. The abasic pseudo-nucleotide lacks a base, and thus is not strictly a nucleotide.

[0087] The term “capping moiety” as used herein includes abasic ribose moiety, abasic deoxyribose moiety, modifications abasic ribose and abasic deoxyribose moieties including 2′ O alkyl modifications; inverted abasic ribose and abasic deoxyribose moieties and modifications thereof; C6-imino-Pi; a mirror nucleotide including L-DNA and L-RNA; 5′O-Me nucleotide; and nucleotide analogs including 4′,5′-methylene nucleotide; 1-(β-D-erythrofuranosyl)nucleotide; 4′-thio nucleotide, carbocyclic nucleotide; 5′-amino-alkyl phosphate; 1,3-diamino-2-propyl phosphate, 3-aminopropyl phosphate; 6-aminohexyl phosphate; 12-aminododecyl phosphate; hydroxypropyl phosphate; 1,5-anhydrohexitol nucleotide; alpha-nucleotide; threo-pentofuranosyl nucleotide; acyclic 3′,4′-seco nucleotide; 3,4-dihydroxybutyl nucleotide; 3,5-dihydroxypentyl nucleotide, 5′-5′-inverted abasic moiety; 1,4-butanediol phosphate; 5′-amino; and bridging or non bridging methylphosphonate and 5′-mercapto moieties.

[0088] Certain preferred capping moieties are abasic ribose or abasic deoxyribose moieties; inverted abasic ribose or abasic deoxyribose moieties; C6-amino-Pi; a mirror nucleotide including L-DNA and L-RNA.

[0089] The term “unconventional moiety” as used herein refers to abasic ribose moiety, an abasic deoxyribose moiety, a deoxyribonucleotide, a modified deoxyribonucleotide, a minor nucleotide, a non-base pairing nucleotide analog and a nucleotide joined to an adjacent nucleotide by a 2′-5′ internucleotide phosphate bond; bridged nucleic acids including LNA and ethylene bridged nucleic acids.

[0090] Abasic deoxyribose moiety includes for example abasic deoxyribose-3′-phosphate; 1,2-dideoxy-D-ribofuranose-3-phosphate; 1,4-anhydro-2-deoxy-D-ribitol-3-phosphate. Inverted abasic deoxyribose moiety includes inverted deoxyriboabasic; 3′,5′ inverted deoxyabasic 5′-phosphate.

[0091] A “mirror” nucleotide is a nucleotide with reversed chirality to the naturally occurring or commonly employed nucleotide, i.e., a mirror image (L-nucleotide) of the naturally occurring (D-nucleotide), also referred to as L-RNA in the case of a mirror ribonucleotide, and “spiegelmer”. The nucleotide can be a ribonucleotide or a deoxyribonucleotide and my further comprise at least one sugar, base and or backbone modification. See U.S. Pat. No. 6,586,238. Also, U.S. Pat. No. 6,602,858 discloses nucleic acid catalysts comprising at least one L-nucleotide substitution. Mirror nucleotide includes for example L-DNA (L-deoxyriboadenosine-3′-phosphate (mirror dA); L-deoxyribocytidine-3′-phosphate (mirror dC); L-deoxyriboguanosine-3′-phosphate (mirror dG); L-deoxyribothymidine-3′-phosphate (mirror image dT)) and L-RNA (L-riboadenosine-3′-phosphate (mirror rA); L-ribocytidine-3′-phosphate (mirror rC); L-riboguanosine-3′-phosphate (mirror rG); L-ribouracil-3′-phosphate (mirror dU).

[0092] Modified deoxyribonucleotide includes, for example 5′OMe DNA (5-methyl-deoxyriboguanosine-3′-phosphate) which may be useful as a nucleotide in the 5′ terminal position (position number 1); PACE (deoxyriboadenine 3′ phosphonoacetate, deoxyribocytidine 3′ phosphonoacetate, deoxyriboguanosine 3′ phosphonoacetate, deoxyribothymidine 3′ phosphonoacetate.

[0093] Bridged nucleic acids include LNA (2′-O, 4′-C-methylene bridged Nucleic Acid adenosine 3′ monophosphate, 2′-O,4′-C-methylene bridged Nucleic Acid 5-methyl-cytidine 3′ monophosphate, 2′-O,4′-C-methylene bridged Nucleic Acid guanosine 3′ monophosphate, 5-methyl-uridine (or thymidine) 3′ monophosphate); and ENA (2′-O,4′-C-ethylene bridged Nucleic Acid adenosine 3′ monophosphate, 2′-O,4′-C-ethylene bridged Nucleic Acid 5-methyl-cytidine 3′ monophosphate, 2′-O,4′-C-ethylene bridged Nucleic Acid guanosine 3′ monophosphate, 5-methyl-uridine (or thymidine) 3′ monophosphate).

[0094] In some embodiments of the present invention a preferred unconventional moiety is an abasic ribose moiety, an abasic deoxyribose moiety, a deoxyribonucleotide, a mirror nucleotide, and a nucleotide joined to an adjacent nucleotide by a 2′-5′ internucleotide phosphate bond.

[0095] According to one aspect the present invention provides inhibitory oligonucleotide compounds comprising unmodified and modified nucleotides. The compound comprises at least one modified nucleotide selected from the group consisting of a sugar modification, a base modification and an internucleotide linkage modification and may contain DNA, and modified nucleotides such as LNA (locked nucleic acid) including ENA (ethylene-bridged nucleic acid; PNA (peptide nucleic acid); arabinoside; PACE (phosphonoacetate and derivatives thereof), mirror nucleotide, or nucleotides with a six-carbon sugar.

[0096] “RTP801 gene” refers to the RTP801 coding sequence open reading frame, set forth in SEQ ID NO:1, or any homologous sequence thereof preferably having at least 70% identity, more preferable 80% identity, even more preferably 90% or 95% identity. This encompasses any sequences derived from SEQ ID NO:1 which have undergone mutations, alterations or modifications as described herein. Thus, in a preferred embodiment RTP801 is encoded by a nucleic acid sequence according to SEQ ID NO 1. It is also within the present invention that the nucleic acids according to the present invention are only complementary and identical, respectively, to a part of the nucleic acid coding for RTP801 as, preferably, the first stretch and first strand is typically shorter than the nucleic acid according to the present invention. It is also to be acknowledged that based on the amino acid sequence of RTP801 any nucleic acid sequence coding for such amino acid sequence can be perceived by the one skilled in the art based on the genetic code. However, due to the assumed mode of action of the nucleic acids according to the present invention, it is most preferred that the nucleic acid coding for RTP801, preferably the mRNA thereof, is the one present in the organism, tissue and/or cell, respectively, where the expression of RTP801 is to be reduced.

[0097] “RTP801 polypeptide” refers to the polypeptide of the RTP801 gene, and is understood to include, for the purposes of the instant invention, the terms “RTP779”, “REDD1”, “DDIT4”, “FLJ20500”, “Dig2”, and “PRF1”, derived from any organism, preferably human, splice variants and fragments thereof retaining biological activity, and homologs thereof, preferably having at least 70%, more preferably at least 80%, even more preferably at least 90% or 95% homology thereto. In addition, this term is understood to encompass polypeptides resulting from minor alterations in the RTP801 coding sequence, such as, inter alia, point mutations, substitutions, deletions and insertions which may cause a difference in a few amino acids between the resultant polypeptide and the naturally occurring RTP801. RTP801 preferably has or comprises an amino acid sequence set forth in SEQ ID NO 2. It is acknowledged that there might be differences in the amino acid sequence among various tissues of an organism and among different organisms of one species or among different species to which the nucleic acid according to the present invention can be applied in various embodiments of the present invention. However, based on the technical teaching provided herein, the respective sequence can be taken into consideration accordingly when designing any of the nucleic acids according to the present invention. Particular fragments of RTP801 include amino acids 1-50, 51-100, 101-150, 151-200 and 201-232 of the sequence set forth in SEQ ID NO:2. Further particular fragments of RTP801 include amino acids 25-74, 75-124, 125-174, 175-224 and 225-232 of the sequence set forth in SEQ ID NO:2.

[0098] RTP801 as used herein is described, among others, in WO 99/09046. RTP801 has also been described as a transcriptional target of HIF-1α by Shoshani T et al. (Shoshani et al., 2002, Mol Cell Biol, 22, 2283-93). Furthermore, Ellisen et al. (Mol Cell, 2002. 10, 995-1005) has identified RTP801 as a p53-dependent DNA damage response gene and as a p63-dependent gene involved in epithelial differentiation. Also, RTP801 expression mirrors the tissue-specific pattern of the p53 family member p63, is effective similar to or in addition to TP63, and is involved in the regulation of reactive oxygen species. Apart from that, RTP801 is responsive to hypoxia-responsive transcription factor hypoxia-inducible factor 1 (HIF-1) and is typically up-regulated during hypoxia both in vitro and in vivo in an animal model of ischemic stroke. RTP801 appears to function in the regulation of reactive oxygen species (ROS). ROS levels and reduced sensitivity to oxidative stress are both increased following ectopic expression of RTP801 gene (Ellisen et al. 2002, supra; Shoshani et al. 2002, supra). Preferably, the product of RTP801 is a biologically active RTP801 protein which preferably exhibits at least one of the characteristics described hereinabove, preferable two or more and most preferably each and any of these characteristics.

[0099] The present invention relates to novel chemically modified oligonucleotides and oligoribonucleotide structures that possess therapeutic properties. In particular, the present invention discloses chemically modified siRNA compounds. The siRNAs of the present invention possess novel structures and novel modifications which have one or more of the following advantages: increased activity or reduced toxicity or reduced off-target effect or reduced immune response or increased stability; the novel modifications of the siRNAs of the present invention are beneficially applied to double stranded RNA useful in preventing or attenuation RTP801 gene expression. The siRNA compounds of the present invention comprise at least one modified nucleotide selected from the group consisting of a sugar modification, a base modification and an internucleotide linkage modification.

[0100] The present invention also relates to compounds which down-regulate expression of RTP801, particularly to novel small interfering RNAs (siRNAs), and to the use of these novel siRNAs in the treatment of various diseases and medical conditions. Particular diseases and conditions to be treated include, without being limited to, hearing loss, acute renal failure (ARF), glaucoma, diabetic retinopathy, diabetic macular edema (DME), diabetic nephropathy and other microvascular disorders, acute respiratory distress syndrome (ARDS) and other acute lung and respiratory injuries and diseases (e.g. chronic obstructive pulmonary disease (COPD)), ischemia-reperfusion injury following lung transplantation, organ transplantation including lung, liver, heart, bone marrow, pancreas, cornea and kidney transplantation, spinal cord injury, pressure sores, age-related macular degeneration (AMD), dry eye syndrome, neurodegenerative disorders, e.g. Alzheimer's disease, Parkinson's disease and ALS, oral mucositis. Other indications include chemical-induced nephrotoxicity and chemical-induced neurotoxicity, for example toxicity induced by cisplatin and cisplatin-like compounds, by aminoglycosides, by loop diuretics, and by hydroquinone and their analogs.

[0101] Lists of sense and antisense oligonucleotides useful in preparation of siRNA to be used in the present invention are provided in Tables A-I which recite SEQ ID NOS. 3-3624. 21- or 23-mer siRNA sequences can also be generated by 5′ and/or 3′ extension of the 19-mer sequences disclosed herein. Such extension is preferably complementary to the corresponding mRNA sequence.

[0102] Methods, chemically modified siRNA molecules and pharmaceutical compositions comprising these chemically modified siRNA compounds which inhibit RTP801 are discussed herein at length, and any of said molecules and/or compositions are beneficially employed in the treatment of a subject suffering from any of said conditions.

[0103] The inventors of the present invention discovered a related albeit distinct gene, RTP801L also referred to as “REDD2”. RTP801L is homologous to RTP801, and reacts in a similar manner to oxidative stress; thus, RTP801L probably possesses some similar functions with RTP801.

[0104] Without being bound by theory, RTP801 being a stress-inducible protein (responding to hypoxia, oxidative stress, thermal stress, ER stress) is a factor acting in fine-tuning of cell response to energy misbalance. As such, it is a target suitable for treatment of any disease where cells should be rescued from apoptosis due to stressful conditions (e.g. diseases accompanied by death of normal cells) or where cells, which are adapted to stressful conditions due to changes in RTP801 expression (e.g. cancer cells), should be killed. In the latter case, RTP801 is viewed as a survival factor for cancer cells and its inhibitors may treat cancer as a monotherapy or as sensitising drugs in combination with chemotherapy or radiotherapy.

[0105] By “biological effect of RTP801 in respiratory disorders” or “RTP801 biological activity in respiratory disorders” is meant the effect of RTP801 in the treatment of a subject suffering from or affected by respiratory disorders, which may be direct or indirect, and includes, without being bound by theory, the effect of RTP801 on apoptosis of alveolar cells induced by hypoxic or hyperoxic conditions. The indirect effect includes, but is not limited to, RTP801 binding to or having an effect on one of several molecules, which are involved in a signal transduction cascade resulting in apoptosis.

[0106] “Apoptosis” refers to a physiological type of cell death which results from activation of some cellular mechanisms, i.e. death that is controlled by the machinery of the cell. Apoptosis may, for example, be the result of activation of the cell machinery by an external trigger, e.g. a cytokine or anti-FAS antibody, which leads to cell death or by an internal signal. The term “programmed cell death” may also be used interchangeably with “apoptosis”.

[0107] “Apoptosis-related disease” or “apoptosis-related condition” refers to a disease whose etiology is related either wholly or partially to the process of apoptosis. The disease may be caused either by a malfunction of the apoptotic process (such as in cancer or an autoimmune disease) or by over activity of the apoptotic process (such as in certain neurodegenerative diseases). Many diseases in which RTP801 is involved are apoptosis-related diseases. For example, apoptosis is a significant mechanism in dry AMD, whereby slow atrophy of photoreceptor and pigment epithelium cells, primarily in the central (macular) region of retina takes place. Neuroretinal apoptosis is also a significant mechanism in diabetic retinopathy.

[0108] “Angiogenesis” refers to the process by which living cells, tissues, or organisms form new blood vessels. Angiogenesis is a fundamental biological process which plays a central role in the pathogenesis of various conditions, and is a major contributor to mortality and morbidity in diseases, such as cancer, diabetic retinopathy, and macular degeneration (Folkman, 1990, JNCI 82: 4-6).

[0109] “Angiogenesis-related condition” refers to any one of the medical conditions or disease states recognized to be influenced by angiogenesis or by an increase/decrease in angiogenesis of by the lack thereof, including conditions which may be linked to angiogenesis in the future. Examples of such conditions include cancer, retinopathy, ischemia, macular degeneration, corneal diseases, glaucoma, diabetic retinopathy, stroke, ischemic heart disease, ulcers, scleradoma, myocardial infarction, myocardial angiogenesis, plaque neovascularization, ischemic limb angiogenesis, angina pectoris, unstable angina, coronary arteriosclerosis, arteriosclerosis obliterans, Berger's disease, arterial embolism, arterial thrombosis, cerebrovascular occlusion, cerebral infarction, cerebral thrombosis, cerebral embolism, inflammation, diabetic neovascularization, wound healing and peptic ulcer.

[0110] An “RTP801 inhibitor” is a siRNA compound which is capable of inhibiting the activity of the RTP801 gene or RTP801 gene product, particularly the human RTP801 gene or gene product. Such inhibitors affect the transcription or translation of the RTP801 gene. In some embodiments an RTP801 inhibitor is a siRNA inhibitor of the RTP801 promoter. Specific chemically modified siRNA inhibitors of RTP801 gene are provided hereinbelow.

[0111] Hypoxia has been recognised as a key element in the pathomechanism of quite a number of diseases such as stroke, emphysema and infarct, which are associated with sub-optimum oxygen availability and tissue damaging responses to the hypoxia conditions. In fast-growing tissues, including tumor, sub-optimum oxygen availability is compensated by undesired neo-angiogenesis. Therefore, at least in case of cancer diseases, the growth of vasculature is undesired.

[0112] Another objective of the present invention is thus to provide compositions and methods for the treatment of diseases involving undesired growth of vasculature and angiogenesis, respectively.

[0113] The present invention provides methods and compositions for inhibiting expression of RTP801 gene in vivo. In general, the method includes administering oligoribonucleotides, in particular small interfering RNAs (i.e. siRNAs) that target an mRNA transcribed from the RTP801 gene in an amount sufficient to down-regulate expression of the RTP801 gene by an RNA interference mechanism. In particular, the subject method can be used to inhibit expression of the RTP801 gene for treatment of a disease. In accordance with the present invention, the siRNA compounds of the invention are used as drugs to treat various pathologies. In particular, the subject method can be used to inhibit expression for treatment of a disease or a disorder or a condition disclosed herein.

[0114] The present invention provides chemically modified siRNA compounds, which down-regulate the expression of a RTP801 gene transcribed into mRNA having a polynucleotide sequence set forth in SEQ ID NO:1 and pharmaceutical compositions comprising one or more such siRNA compounds.

[0115] A siRNA of the invention is a duplex oligoribonucleotide in which the sense strand is substantially complementary to an 18-40 consecutive nucleotide segment of the mRNA polynucleotide sequence of RTP801 gene, and the antisense strand is substantially complementary to the sense strand. In general, some deviation from the target mRNA sequence is tolerated without compromising the siRNA activity (see e.g. Czauderna et al., Nuc. Acids Res. 2003, 31(10:2705-2716). A siRNA of the invention inhibits RTP801 gene expression on a post-transcriptional level with or without destroying the mRNA. Without being bound by theory, siRNA targets the mRNA for specific cleavage and degradation and/or inhibits translation from the targeted message.

[0116] In some embodiments the siRNA is blunt ended, on one or both ends. More specifically, in some embodiments the siRNA is blunt ended on the end defined by the 5′-terminus of the first strand and the 3′-terminus of the second strand, or the end defined by the 3′-terminus of the first strand and the 5′-terminus of the second strand.

[0117] In other embodiments at least one of the two strands has an overhang of at least one nucleotide at the 5′-terminus; the overhang comprises at least one deoxyribonucleotide. At least one of the strands also optionally has an overhang of at least one nucleotide at the 3′-terminus. The overhang consists of from about 1 to about 5 nucleotides.

[0118] The length of RNA duplex is from about 18 to about 40 ribonucleotides, preferably 19 to 23 ribonucleotides. In some embodiments the length of each strand (oligomer) is independently selected from the group consisting of about 18 to about 40 bases, preferably 18 to 23 bases and more preferably 19, 20 or 21 ribonucleotides.

[0119] Additionally, in certain preferred embodiments the complementarity between said first strand and the target nucleic acid is perfect. In some embodiments, the strands are substantially complementary, i.e. having one, two or up to three mismatches between said first strand and the target nucleic acid.

[0120] In some embodiments the 5′-terminus of the first strand of the siRNA is linked to the 3′-terminus of the second strand, or the 3′-terminus of the first strand is linked to the 5′-terminus of the second strand, said linkage being via a nucleic acid linker typically having a length between 3-100 nucleotides, preferably about 3 to about 10 nucleotides.

[0121] The siRNAs compounds of the present invention possess structures and modifications which impart one or more of increased activity, increased stability, reduced toxicity, reduced off target effect, and/or reduced immune response. The siRNA structures of the present invention are beneficially applied to double stranded RNA useful in preventing or attenuating expression of RTP801 gene.

[0122] The present invention also relates to the use of the chemically modified siRNAs in the treatment of various diseases and medical conditions. Particular diseases and conditions to be treated are ARDS; COPD; ALI; Emphysema; Diabetic Neuropathy, nephropathy and retinopathy; DME and other diabetic conditions; Glaucoma; AMD; BMT retinopathy; ischemic conditions including stroke; OIS; Neurodegenerative disorders such as Parkinson's, Alzheimer's, ALS; kidney disorders: ARF, DGF, transplant rejection; hearing disorders; spinal cord injuries; oral mucositis; dry eye syndrome and pressure sores. Lists of siRNA to be used in the present invention are provided in Tables A-I. Tables A, B, D, E and I set forth 19-mer oligomers. Tables C and F set forth 21-mer oligomers. Tables G and H set forth 23-mer oligomers. 21- or 23-mer siRNA sequences can also be generated by 5′ and/or 3′ extension of the 19-mer sequences disclosed herein. Such extension is preferably complementary to the corresponding mRNA sequence.

[0123] Tables A-C include oligonucleotide pairs set forth in SEQ ID NOS:3-344, were disclosed by the assignee of the present invention in PCT Patent Application No. PCT/US2005/029236, published as WO 2006/023544. Table D includes oligonucleotide pairs set forth in SEQ ID NOS:345-412, were disclosed by the assignee of the present invention in PCT Patent Application No. PCT/US2008/002483, published as WO 2008/106102.

[0124] Methods, molecules and compositions of the present invention which inhibit the RTP801 gene are discussed herein at length, and any of said molecules and/or compositions are beneficially employed in the treatment of a subject suffering from one or more of said conditions.

[0125] Where aspects or embodiments of the invention are described in terms of Markush groups or other grouping of alternatives, those skilled in the art will recognize that the invention is also thereby described in terms of any individual member or subgroup of members of the group.

siRNA Oligonucleotides

[0126] Tables A-I provide nucleic acid sequences of sense and corresponding antisense oligonucleotides, useful in preparing chemically modified siRNA compounds of the invention. Antisense and corresponding sense oligonucleotides useful in preparing siRNA according to the present invention are set forth in SEQ ID NOS:3-3624. Throughout the specification, nucleotide positions are numbered from 1 to 19 or 1 to 21 or 1 to 23 and are counted from the 5′ end of the antisense or sense oligonucleotides. For example, position 1 on (N)x refers to the 5′ terminal nucleotide on the antisense oligonucleotide strand and position 1 on (N′)y refers to the 5′ terminal nucleotide on the sense oligonucleotide strand.

[0127] According to the present invention the siRNA compounds are chemically and or structurally modified according to one of the following modifications set forth in Structures (A)-(P) or as tandem siRNA or RNAstar.

[0128] In one aspect the present invention provides a compound set forth as Structure (A):

| | | |
|---|---|---|
| (A) | 5′ (N)ₓ-Z 3′ | (antisense strand) |
| | 3′ Z′-(N′)_{y} 5′ | (sense strand) |

wherein each of N and N′ is a nucleotide selected from an unmodified ribonucleotide, a modified ribonucleotide, an unmodified deoxyribonucleotide and a modified deoxyribonucleotide;
wherein each of (N)ₓ and (N′)_{y} is an oligonucleotide in which each consecutive N or N′ is joined to the next N or N′ by a covalent bond;
wherein each of x and y is an integer between 18 and 40;
wherein each of Z and Z′ may be present or absent, but if present is 1-5 consecutive nucleotides covalently attached at the 3′ terminus of the strand in which it is present;
wherein the sequence of (N′)_{y} is a sequence substantially complementary to (N)x; and
wherein the sequence of (N)ₓ comprises an antisense sequence substantially identical to an antisense sequence disclosed in any one of Tables E-I.

[0129] In certain embodiments the present invention provides a compound having structure (B):

| | | |
|---|---|---|
| (B) | 5′ (N)x-Z 3′ | antisense strand |
| | 3′ Z-′(N′)y 5′ | sense strand |

wherein each of (N)ₓ and (N′)_{y} is an oligomer in which each consecutive N or N′ is an unmodified ribonucleotide or a modified ribonucleotide joined to the next N or N′ by a covalent bond;
wherein each of x and y=19, 21 or 23 and (N)ₓ and (N′)_{y} are fully complementary
wherein each of Z and Z′ may be present or absent, but if present is 1-5 consecutive nucleotides covalently attached at the 3′ terminus of the strand in which it is present;
wherein alternating ribonucleotides in each of (N)ₓ and (N′)_{y} are 2′-O-methyl sugar modified ribonucleotides;
wherein the sequence of (N′)_{y} is a sequence substantially complementary to (N)x; and
wherein the sequence of (N)ₓ comprises an antisense sequence substantially identical to an antisense sequence disclosed in any one of Tables E-I

[0130] In some embodiments each of (N)ₓ and (N′)_{y} is independently phosphorylated or non-phosphorylated at the 3′ and 5′ termini.

[0131] In certain embodiments wherein each of x and y=19 or 23, each N at the 5′ and 3′ termini of (N)ₓ is modified; and each N′ at the 5′ and 3′ termini of (N′)_{y} is unmodified.

[0132] In certain embodiments wherein each of x and y=21, each N at the 5′ and 3′ termini of (N)ₓ is unmodified; and each N′ at the 5′ and 3′ termini of (N′)_{y} is modified.

[0133] In particular embodiments, x and y=19, and the siRNA is modified such that a 2′-O-methyl sugar modified ribonucleotide (2′-OMe) is present in the first, third, fifth, seventh, ninth, eleventh, thirteenth, fifteenth, seventeenth and nineteenth positions of the antisense strand (N)ₓ, and a 2′-OMe sugar modified ribonucleotide is present in the second, fourth, sixth, eighth, tenth, twelfth, fourteenth, sixteenth and eighteenth positions of the sense strand (N′)_{y}.

[0134] In some embodiments, the present invention provides a compound having Structure (C):

| | | |
|---|---|---|
| (C) | 5′ (N)x-Z 3′ | antisense strand |
| | 3′ Z′-(N′)y 5′ | sense strand |

wherein each of N and N′ is a nucleotide independently selected from an unmodified ribonucleotide, a modified ribonucleotide, an unmodified deoxyribonucleotide and a modified deoxyribonucleotide;
wherein each of (N)x and (N′)y is an oligomer in which each consecutive nucleotide is joined to the next nucleotide by a covalent bond and each of x and y is an integer between 18 and 40;
wherein in (N)x the nucleotides are unmodified or (N)x comprises alternating modified ribonucleotides and unmodified ribonucleotides; each modified ribonucleotide being modified so as to have a 2′-O-methyl on its sugar and the ribonucleotide located at the middle position of (N)x being modified or unmodified preferably unmodified;
wherein (N′)y comprises unmodified ribonucleotides further comprising one modified nucleotide at a terminal or penultimate position, wherein the modified nucleotide is selected from the group consisting of a mirror nucleotide, a bicyclic nucleotide, a 2′-sugar modified nucleotide, an altritol nucleotide, or a nucleotide joined to an adjacent nucleotide by an internucleotide linkage selected from a 2′-5′ phosphodiester bond, a P-alkoxy linkage or a PACE linkage;
wherein if more than one nucleotide is modified in (N′)y, the modified nucleotides may be consecutive;
wherein each of Z and Z′ may be present or absent, but if present is 1-5 deoxyribonucleotides covalently attached at the 3′ terminus of any oligomer to which it is attached;
wherein the sequence of (N′)_{y} comprises a sequence substantially complementary to (N)x; and wherein the sequence of (N)ₓ comprises an antisense sequence substantially complementary to about 18 to about 40 consecutive ribonucleotides in mRNA of the RTP801 gene, set forth in SEQ ID NO: 1. Preferably (N)ₓ comprises an antisense sequence substantially identical to an antisense sequence set forth in any one of Tables A-I.

[0135] In particular embodiments, x=y=19 and in (N)x each modified ribonucleotide is modified so as to have a 2′-O-methyl on its sugar and the ribonucleotide located at the middle of (N)x is unmodified. Accordingly, in a compound wherein x=˜19, (N)x comprises 2′-O-methyl sugar modified ribonucleotides at positions 1, 3, 5, 7, 9, 11, 13, 15, 17 and 19. In other embodiments, (N)x comprises 2′O Me modified ribonucleotides at positions 2, 4, 6, 8, 11, 13, 15, 17 and 19 and may further comprise at least one abasic or inverted abasic unconventional moiety for example in position 5. In other embodiments, (N)x comprises 2′O Me modified ribonucleotides at positions 2, 4, 8, 11, 13, 15, 17 and 19 and may further comprise at least one abasic or inverted abasic unconventional moiety for example in position 6. In other embodiments, (N)x comprises 2′O Me modified ribonucleotides at positions 2, 4, 6, 8, 11, 13, 17 and 19 and may further comprise at least one abasic or inverted abasic unconventional moiety for example in position 15. In other embodiments, (N)x comprises 2′O Me modified ribonucleotides at positions 2, 4, 6, 8, 11, 13, 15, 17 and 19 and may further comprise at least one abasic or inverted abasic unconventional moiety for example in position 14. In other embodiments, (N)x comprises 2′O Me modified ribonucleotides at positions 1, 2, 3, 7, 9, 11, 13, 15, 17 and 19 and may further comprise at least one abasic or inverted abasic unconventional moiety for example in position 5. In other embodiments, (N)x comprises 2′O Me modified ribonucleotides at positions 1, 2, 3, 5, 7, 9, 11, 13, 15, 17 and 19 and may further comprise at least one abasic or inverted abasic unconventional moiety for example in position 6. In other embodiments, (N)x comprises 2′O Me modified ribonucleotides at positions 1, 2, 3, 5, 7, 9, 11, 13, 17 and 19 and may further comprise at least one abasic or inverted abasic unconventional moiety for example in position 15. In other embodiments, (N)x comprises 2′O Me modified ribonucleotides at positions 1, 2, 3, 5, 7, 9, 11, 13, 15, 17 and 19 and may further comprise at least one abasic or inverted abasic unconventional moiety for example in position 14. In other embodiments, (N)x comprises 2′O Me modified ribonucleotides at positions 2, 4, 6, 7, 9, 11, 13, 15, 17 and 19 and may further comprise at least one abasic or inverted abasic unconventional moiety for example in position 5. In other embodiments, (N)x comprises 2′O Me modified ribonucleotides at positions 1, 2, 4, 6, 7, 9, 11, 13, 15, 17 and 19 and may further comprise at least one abasic or inverted abasic unconventional moiety for example in position 5. In other embodiments, (N)x comprises 2′O Me modified ribonucleotides at positions 2, 4, 6, 8, 11, 13, 14, 16, 17 and 19 and may further comprise at least one abasic or inverted abasic unconventional moiety for example in position 15. In other embodiments, (N)x comprises 2′O Me modified ribonucleotides at positions 1, 2, 3, 5, 7, 9, 11, 13, 14, 16, 17 and 19 and may further comprise at least one abasic or inverted abasic unconventional moiety for example in position 15. In other embodiments, (N)x comprises 2′O Me modified ribonucleotides at positions 2, 4, 6, 8, 11, 13, 15, 17 and 19 and may further comprise at least one abasic or inverted abasic unconventional moiety for example in position 7. In other embodiments, (N)x comprises 2′O-Me modified ribonucleotides at positions 2, 4, 6, 11, 13, 15, 17 and 19 and may further comprise at least one abasic or inverted abasic unconventional moiety for example in position 8. In other embodiments, (N)x comprises 2′O Me modified ribonucleotides at positions 2, 4, 6, 8, 11, 13, 15, 17 and 19 and may further comprise at least one abasic or inverted abasic unconventional moiety for example in position 9. In other embodiments, (N)x comprises 2′O Me modified ribonucleotides at positions 2, 4, 6, 8, 11, 13, 15, 17 and 19 and may further comprise at least one abasic or inverted abasic unconventional moiety for example in position 10. In other embodiments, (N)x comprises 2′O Me modified ribonucleotides at positions 2, 4, 6, 8, 13, 15, 17 and 19 and may further comprise at least one abasic or inverted abasic unconventional moiety for example in position 11. In other embodiments, (N)x comprises 2′O Me modified ribonucleotides at positions 2, 4, 6, 8, 11, 13, 15, 17 and 19 and may further comprise at least one abasic or inverted abasic unconventional moiety for example in position 12. In other embodiments, (N)x comprises 2′O-Me modified ribonucleotides at positions 2, 4, 6, 8, 11, 15, 17 and 19 and may further comprise at least one abasic or inverted abasic unconventional moiety for example in position 13.

[0136] In yet other embodiments (N)x comprises at least one nucleotide mismatch relative to the RTP801 mRNA. In certain preferred embodiments, (N)x comprises a single nucleotide mismatch on position 5, 6, or 14. In one embodiment of Structure (C), at least two nucleotides at either or both the 5′ and 3′ termini of (N′)y are joined by a 2′-5′ phosphodiester bond. In certain preferred embodiments x=y=19 or x=y=23; in (N)x the nucleotides alternate between modified ribonucleotides and unmodified ribonucleotides, each modified ribonucleotide being modified so as to have a 2′-O-methyl on its sugar and the ribonucleotide located at the middle of (N)x being unmodified; and three nucleotides at the 3′ terminus of (N′)y are joined by two 2′-5′ phosphodiester bonds (set forth herein as Structure I). In other preferred embodiments, x=y=19 or x=y=23; in (N)x the nucleotides alternate between modified ribonucleotides and unmodified ribonucleotides, each modified ribonucleotide being modified so as to have a 2′-O-methyl on its sugar and the ribonucleotide located at the middle of (N)x being unmodified; and four consecutive nucleotides at the 5′ terminus of (N′)y are joined by three 2′-5′ phosphodiester bonds. In a further embodiment, an additional nucleotide located in the middle position of (N)y may be modified with 2′-O-methyl on its sugar. In another preferred embodiment, in (N)x the nucleotides alternate between 2′-O-methyl modified ribonucleotides and unmodified ribonucleotides, and in (N′)y four consecutive nucleotides at the 5′ terminus are joined by three 2′-5′ phosphodiester bonds and the 5′ terminal nucleotide or two or three consecutive nucleotides at the 5′ terminus comprise 3′-O-methyl modifications.

[0137] In certain preferred embodiments of Structure C, x=y=19 and in (N′)y, at least one position comprises an abasic or inverted abasic unconventional moiety, preferably five positions comprises an abasic or inverted abasic unconventional moieties. In various embodiments, the following positions comprise an abasic or inverted abasic: positions 1 and 16-19, positions 15-19, positions 1-2 and 17-19, positions 1-3 and 18-19, positions 1-4 and 19 and positions 1-5. (N′)y may further comprise at least one LNA nucleotide.

[0138] In certain preferred embodiments of Structure C, x=y=19 and in (N′)y the nucleotide in at least one position comprises a mirror nucleotide, a deoxyribonucleotide and a nucleotide joined to an adjacent nucleotide by a 2′-5′ internucleotide bond.

[0139] In certain preferred embodiments of Structure C, x=y=19 and (N′)y comprises a mirror nucleotide. In various embodiments the mirror nucleotide is an L-DNA nucleotide. In certain embodiments the L-DNA is L-deoxyribocytidine. In some embodiments (N′)y comprises L-DNA at position 18. In other embodiments (N′)y comprises L-DNA at positions 17 and 18. In certain embodiments (N′)y comprises L-DNA substitutions at positions 2 and at one or both of positions 17 and 18. In certain embodiments (N′)y further comprises a 5′ terminal cap nucleotide such as 5′-O-methyl DNA or an abasic or inverted abasic moiety as an overhang.

[0140] In yet other embodiments (N′)y comprises a DNA at position 15 and L-DNA at one or both of positions 17 and 18. In that structure, position 2 may further comprise an L-DNA or an abasic unconventional moiety.

[0141] Other embodiments of Structure C are envisaged wherein x=y=21 in these embodiments the modifications for (N′)y discussed above instead of being on positions 15, 16, 17, 18 are on positions 17, 18, 19, 20 for 21-mer; similarly the modifications at one or both of positions 17 and 18 are on one or both of positions 19 or 20 for the 21-mer. All modifications in the 19-mer are similarly adjusted for the 21- and 23-mer.

[0142] According to various embodiments of Structure (C), in (N′)y 2, 3, 4, 5, 6, 7, 8, 9, 10, 11, 12, 13 or 14 consecutive ribonucleotides at the 3′ terminus are linked by 2′-5′ internucleotide linkages. In one preferred embodiment, four consecutive nucleotides at the 3′ terminus of (N′)y are joined by three 2′-5′ phosphodiester bonds, wherein one or more of the 2′-5′ nucleotides which form the 2′-5′ phosphodiester bonds further comprises a 3′-O-methyl sugar modification. Preferably the 3′ terminal nucleotide of (N′)y comprises a 2′-O-methyl sugar modification. In certain preferred embodiments of Structure C, x=y=19 and in (N′)y two or more consecutive nucleotides at positions 15, 16, 17, 18 and 19 comprise a nucleotide joined to an adjacent nucleotide by a 2′-5′ internucleotide bond. In various embodiments the nucleotide forming the 2′-5′ internucleotide bond comprises a 3′ deoxyribose nucleotide or a 3′ methoxy nucleotide. In some embodiments the nucleotides at positions 17 and 18 in (N′)y are joined by a 2′-5′ internucleotide bond. In other embodiments the nucleotides at positions 16-17, 17-18, or 16-18 in (N′)y are joined by a 2′-5′ internucleotide bond.

[0143] In certain embodiments (N′)y comprises an L-DNA at position 2 and 2′-5′ internucleotide bonds at positions 16-17, 17-18, or 16-18. In certain embodiments (N′)y comprises 2′-5′ internucleotide bonds at positions 16-17, 17-18, or 16-18 and a 5′ terminal cap nucleotide.

[0144] According to various embodiments of Structure (C), in (N′)y 2, 3, 4, 5, 6, 7, 8, 9, 10, 11, 12, 13 or 14 consecutive nucleotides at either terminus or 2-8 modified nucleotides at each of the 5′ and 3′ termini are independently mirror nucleotides. In some embodiments the mirror nucleotide is an L-ribonucleotide. In other embodiments the mirror nucleotide is an L-deoxyribonucleotide. The mirror nucleotide may further be modified at the sugar or base moiety or in an internucleotide linkage.

[0145] In one preferred embodiment of Structure (C), the 3′ terminal nucleotide or two or three consecutive nucleotides at the 3′ terminus of (N′)y are L-deoxyribonucleotides.

[0146] In other embodiments of Structure (C), in (N′)y 2, 3, 4, 5, 6, 7, 8, 9, 10, 11, 12, 13 or 14 consecutive ribonucleotides at either terminus or 2-8 modified nucleotides at each of the 5′ and 3′ termini are independently 2′ sugar modified nucleotides. In some embodiments the 2′ sugar modification comprises the presence of an amino, a fluoro, an alkoxy or an alkyl moiety. In certain embodiments the 2′ sugar modification comprises a methoxy moiety (2′-OMe). In one series of preferred embodiments, three, four or five consecutive nucleotides at the 5′ terminus of (N′)y comprise the 2′-OMe modification. In another preferred embodiment, three consecutive nucleotides at the 3′ terminus of (N′)y comprise the 2′-O-methyl modification.

[0147] In some embodiments of Structure (C), in (N′)y 2, 3, 4, 5, 6, 7, 8, 9, 10, 11, 12, 13 or 14 consecutive ribonucleotides at either or 2-8 modified nucleotides at each of the 5′ and 3′ termini are independently bicyclic nucleotides. In various embodiments the bicyclic nucleotide is a locked nucleic acid (LNA) or a species of LNA, e.g. 2′-O, 4′-C-ethylene-bridged nucleic acid (ENA) is a species of LNA.

[0148] In various embodiments (N′)y comprises modified nucleotides at the 5′ terminus or at both the 3′ and 5′ termini.

[0149] In some embodiments of Structure (C), at least two nucleotides at either or both the 5′ and 3′ termini of (N′)y are joined by P-ethoxy backbone modifications. In certain preferred embodiments x=y=19 or x=y=23; in (N)x the nucleotides alternate between modified ribonucleotides and unmodified ribonucleotides, each modified ribonucleotide being modified so as to have a 2′-O-methyl on its sugar and the ribonucleotide located at the middle position of (N)x being unmodified; and four consecutive nucleotides at the 3′ terminus or at the 5′ terminus of (N′)y are joined by three P-ethoxy backbone modifications. In another preferred embodiment, three consecutive nucleotides at the 3′ terminus or at the 5′ terminus of (N′)y are joined by two P-ethoxy backbone modifications.

[0150] In some embodiments of Structure (C), in (N′)y 2, 3, 4, 5, 6, 7 or 8, consecutive ribonucleotides at each of the 5′ and 3′ termini are independently mirror nucleotides, nucleotides joined by 2′-5′ phosphodiester bond, 2′ sugar modified nucleotides or bicyclic nucleotide. In one embodiment, the modification at the 5′ and 3′ termini of (N′)y is identical. In one preferred embodiment, four consecutive nucleotides at the 5′ terminus of (N′)y are joined by three 2′-5′ phosphodiester bonds and three consecutive nucleotides at the 3′ terminus of (N′)y are joined by two 2′-5′ phosphodiester bonds. In another embodiment, the modification at the 5′ terminus of (N′)y is different from the modification at the 3′ terminus of (N′)y. In one specific embodiment, the modified nucleotides at the 5′ terminus of (N′)y are mirror nucleotides and the modified nucleotides at the 3′ terminus of (N′)y are joined by 2′-5′ phosphodiester bond. In another specific embodiment, three consecutive nucleotides at the 5′ terminus of (N′)y are LNA nucleotides and three consecutive nucleotides at the 3′ terminus of (N′)y are joined by two 2′-5′ phosphodiester bonds. In (N)x the nucleotides alternate between modified ribonucleotides and unmodified ribonucleotides, each modified ribonucleotide being modified so as to have a 2′-O-methyl on its sugar and the ribonucleotide located at the middle of (N)x being unmodified, or the ribonucleotides in (N)x being unmodified.

[0151] In another embodiment of Structure (C), the present invention provides a compound wherein x=y=19 or x=y=23; in (N)x the nucleotides alternate between modified ribonucleotides and unmodified ribonucleotides, each modified ribonucleotide being modified so as to have a 2′-O-methyl on its sugar and the ribonucleotide located at the middle of (N)x being unmodified; three nucleotides at the 3′ terminus of (N′)y are joined by two 2′-5′ phosphodiester bonds and three nucleotides at the 5′ terminus of (N′)y are LNA such as ENA.

[0152] In another embodiment of Structure (C), five consecutive nucleotides at the 5′ terminus of (N′)y comprise the 2′-O-methyl sugar modification and two consecutive nucleotides at the 3′ terminus of (N′)y are L-DNA.

[0153] In yet another embodiment, the present invention provides a compound wherein x=y=19 or x=y=23; (N)x consists of unmodified ribonucleotides; three consecutive nucleotides at the 3′ terminus of (N′)y are joined by two 2′-5′ phosphodiester bonds and three consecutive nucleotides at the 5′ terminus of (N′)y are LNA such as ENA.

[0154] According to other embodiments of Structure (C), in (N′)y the 5′ or 3′ terminal nucleotide, or 2, 3, 4, 5 or 6 consecutive nucleotides at either termini or 1-4 modified nucleotides at each of the 5′ and 3′ termini are independently phosphonocarboxylate or phosphinocarboxylate nucleotides (PACE nucleotides). In some embodiments the PACE nucleotides are deoxyribonucleotides. In some preferred embodiments in (N′)y, 1 or 2 consecutive nucleotides at each of the 5′ and 3′ termini are PACE nucleotides.

[0155] In additional embodiments, the present invention provides a compound having Structure (D):

| | | |
|---|---|---|
| (D) | 5′ (N)x-Z 3′ | antisense strand |
| | 3′ Z′-(N′)y 5′ | sense strand |

wherein each of N and N′ is a nucleotide selected from an unmodified ribonucleotide, a modified ribonucleotide, an unmodified deoxyribonucleotide or a modified deoxyribonucleotide;
wherein each of (N)x and (N′)y is an oligomer in which each consecutive nucleotide is joined to the next nucleotide by a covalent bond and each of x and y is independently an integer between 18 and 40;
wherein (N)x comprises unmodified ribonucleotides further comprising one modified nucleotide at the 3′ terminal or penultimate position, wherein the modified nucleotide is selected from the group consisting of a bicyclic nucleotide, a 2′ sugar modified nucleotide, a mirror nucleotide, an altritol nucleotide, or a nucleotide joined to an adjacent nucleotide by an internucleotide linkage selected from a 2′-5′ phosphodiester bond, a P-alkoxy linkage or a PACE linkage;
wherein (N′)y comprises unmodified ribonucleotides further comprising one modified nucleotide at the 5′ terminal or penultimate position, wherein the modified nucleotide is selected from the group consisting of a bicyclic nucleotide, a 2′ sugar modified nucleotide, a mirror nucleotide, an altritol nucleotide, or a nucleotide joined to an adjacent nucleotide by an internucleotide linkage selected from a 2′-5′ phosphodiester bond, a P-alkoxy linkage or a PACE linkage;
wherein in each of (N)x and (N′)y modified and unmodified nucleotides are not alternating;
wherein each of Z and Z′ may be present or absent, but if present is 1-5 deoxyribonucleotides covalently attached at the 3′ terminus of any oligomer to which it is attached;
wherein the sequence of (N′)_{y} is a sequence substantially complementary to (N)x; and wherein the sequence of (N)ₓ comprises an antisense sequence substantially complementary to about 18 to about 40 consecutive ribonucleotides in a RTP801 mRNA. Preferably (N)ₓ comprises an antisense sequence substantially identical to an antisense sequence set forth in any one of Tables A-I.

[0156] In one embodiment of Structure (D), x=y=19 or x=y=23; (N)x comprises unmodified ribonucleotides in which two consecutive nucleotides linked by one 2′-5′ internucleotide linkage at the 3′ terminus; and (N′)y comprises unmodified ribonucleotides in which two consecutive nucleotides are linked by one 2′-5′ internucleotide linkage at the 5′ terminus.

[0157] In some embodiments, x=y=19 or x=y=23; (N)x comprises unmodified ribonucleotides in which three consecutive nucleotides at the 3′ terminus are joined together by two 2′-5′ phosphodiester bonds; and (N′)y comprises unmodified ribonucleotides in which four consecutive nucleotides at the 5′ terminus are joined together by three 2′-5′ phosphodiester bonds (set forth herein as Structure II).

[0158] According to various embodiments of Structure (D), 2, 3, 4, 5, 6, 7, 8, 9, 10, 11, 12, 13 or 14 consecutive ribonucleotides starting at the ultimate or penultimate position of the 3′ terminus of (N)x and 2, 3, 4, 5, 6, 7, 8, 9, 10, 11, 12, 13 or 14 consecutive ribonucleotides starting at the ultimate or penultimate position of the 5′ terminus of (N′)y are linked by 2′-5′ internucleotide linkages.

[0159] According to one preferred embodiment of Structure (D), four consecutive nucleotides at the 5′ terminus of (N′)y are joined by three 2′-5′ phosphodiester bonds and three consecutive nucleotides at the 3′ terminus of (N′)x are joined by two 2′-5′ phosphodiester bonds. Three nucleotides at the 5′ terminus of (N′)y and two nucleotides at the 3′ terminus of (N′)x may also comprise 3′-O-methyl modifications.

[0160] According to various embodiments of Structure (D), 2, 3, 4, 5, 6, 7, 8, 9, 10, 11, 12, 13 or 14 consecutive nucleotides starting at the ultimate or penultimate position of the 3′ terminus of (N)x and 2, 3, 4, 5, 6, 7, 8, 9, 10, 11, 12, 13 or 14 consecutive ribonucleotides starting at the ultimate or penultimate position of the 5′ terminus of (N′)y are independently mirror nucleotides. In some embodiments the mirror is an L-ribonucleotide. In other embodiments the mirror nucleotide is L-deoxyribonucleotide.

[0161] In other embodiments of Structure (D), 2, 3, 4, 5, 6, 7, 8, 9, 10, 11, 12, 13 or 14 consecutive ribonucleotides starting at the ultimate or penultimate position of the 3′ terminus of (N)x and 2, 3, 4, 5, 6, 7, 8, 9, 10, 11, 12, 13 or 14 consecutive ribonucleotides starting at the ultimate or penultimate position of the 5′ terminus of (N′)y are independently 2′ sugar modified nucleotides. In some embodiments the 2′ sugar modification comprises an amino, a fluoro, an alkoxy or an alkyl moiety. In certain embodiments the 2′ sugar modification comprises a methoxy moiety (2′-OMe).

[0162] In one preferred embodiment of Structure (D), five consecutive nucleotides at the 5′ terminus of (N′)y comprise the 2′-O-methyl modification and five consecutive nucleotides at the 3′ terminus of (N′)x comprise the 2′-O-methyl modification. In another preferred embodiment of Structure (D), ten consecutive nucleotides at the 5′ terminus of (N′)y comprise the 2′-O-methyl modification and five consecutive nucleotides at the 3′ terminus of (N′)x comprise the 2′-O-methyl modification. In another preferred embodiment of Structure (D), thirteen consecutive nucleotides at the 5′ terminus of (N′)y comprise the 2′-O-methyl modification and five consecutive nucleotides at the 3′ terminus of (N′)x comprise the 2′-O-methyl modification.

[0163] In some embodiments of Structure (D), 2, 3, 4, 5, 6, 7, 8, 9, 10, 11, 12, 13 or 14 consecutive ribonucleotides starting at the ultimate or penultimate position of the 3′ terminus of (N)x and 2, 3, 4, 5, 6, 7, 8, 9, 10, 11, 12, 13 or 14 consecutive ribonucleotides starting at the ultimate or penultimate position of the 5′ terminus of (N′)y are independently a bicyclic nucleotide. In various embodiments the bicyclic nucleotide is a locked nucleic acid (LNA) such as a 2′-O, 4′-C-ethylene-bridged nucleic acid (ENA).

[0164] In various embodiments of Structure (D), (N′)y comprises a modified nucleotide selected from a bicyclic nucleotide, a 2′ sugar modified nucleotide, a mirror nucleotide, an altritol nucleotide or a nucleotide joined to an adjacent nucleotide by an internucleotide linkage selected from a 2′-5′ phosphodiester bond, a P-alkoxy linkage or a PACE linkage;

[0165] In various embodiments of Structure (D), (N)x comprises a modified nucleotide selected from a bicyclic nucleotide, a 2′ sugar modified nucleotide, a mirror nucleotide, an altritol nucleotide or a nucleotide joined to an adjacent nucleotide by an internucleotide linkage selected from a 2′-5′ phosphodiester bond, a P-alkoxy linkage or a PACE linkage;

[0166] In some embodiments wherein each of the 3′ and 5′ termini of the same strand comprises a modified nucleotide, the modification at the 5′ and 3′ termini is identical. In another embodiment, the modification at the 5′ terminus is different from the modification at the 3′ terminus of the same strand. In one specific embodiment, the modified nucleotides at the 5′ terminus are mirror nucleotides and the modified nucleotides at the 3′ terminus of the same strand are joined by 2′-5′ phosphodiester bond.

[0167] In one specific embodiment of Structure (D), five consecutive nucleotides at the 5′ terminus of (N′)y comprise the 2′-O-methyl modification and two consecutive nucleotides at the 3′ terminus of (N′)y are L-DNA. In addition, the compound may further comprise five consecutive 2′-O-methyl modified nucleotides at the 3′ terminus of (N′)x.

[0168] In various embodiments of Structure (D), the modified nucleotides in (N)x are different from the modified nucleotides in (N′)y. For example, the modified nucleotides in (N)x are 2′ sugar modified nucleotides and the modified nucleotides in (N′)y are nucleotides linked by 2′-5′ internucleotide linkages. In another example, the modified nucleotides in (N)x are mirror nucleotides and the modified nucleotides in (N′)y are nucleotides linked by 2′-5′ internucleotide linkages. In another example, the modified nucleotides in (N)x are nucleotides linked by 2′-5′ internucleotide linkages and the modified nucleotides in (N′)y are mirror nucleotides.

[0169] In additional embodiments, the present invention provides a compound having Structure (E):

| | | |
|---|---|---|
| (E) | 5′ (N)x-Z 3′ | antisense strand |
| | 3′ Z′-(N′)y 5′ | sense strand |

wherein each of N and N′ is a nucleotide selected from an unmodified ribonucleotide, a modified ribonucleotide, an unmodified deoxyribonucleotide or a modified deoxyribonucleotide;
wherein each of (N)x and (N′)y is an oligomer in which each consecutive nucleotide is joined to the next nucleotide by a covalent bond and each of x and y is independently an integer between 18 and 40;
wherein (N)x comprises unmodified ribonucleotides further comprising one modified nucleotide at the 5′ terminal or penultimate position, wherein the modified nucleotide is selected from the group consisting of a bicyclic nucleotide, a 2′ sugar modified nucleotide, a mirror nucleotide, an altritol nucleotide, or a nucleotide joined to an adjacent nucleotide by an internucleotide linkage selected from a 2′-5′ phosphodiester bond, a P-alkoxy linkage or a PACE linkage;
wherein (N′)y comprises unmodified ribonucleotides further comprising one modified nucleotide at the 3′ terminal or penultimate position, wherein the modified nucleotide is selected from the group consisting of a bicyclic nucleotide, a 2′ sugar modified nucleotide, a mirror nucleotide, an altritol nucleotide, or a nucleotide joined to an adjacent nucleotide by an internucleotide linkage selected from a 2′-5′ phosphodiester bond, a P-alkoxy linkage or a PACE linkage;
wherein in each of (N)x and (N′)y modified and unmodified nucleotides are not alternating;
wherein each of Z and Z′ may be present or absent, but if present is 1-5 deoxyribonucleotides covalently attached at the 3′ terminus of any oligomer to which it is attached;
wherein the sequence of (N′)_{y} is a sequence substantially complementary to (N)x; and wherein the sequence of (N)ₓ comprises an antisense sequence substantially complementary to about 18 to about 40 consecutive ribonucleotides in a RTP801 mRNA. Preferably (N)ₓ comprises an antisense sequence substantially identical to an antisense sequence set forth in any one of Tables A-I.

[0170] In certain preferred embodiments the ultimate nucleotide at the 5′ terminus of (N)x is unmodified.

[0171] According to various embodiments of Structure (E), 2, 3, 4, 5, 6, 7, 8, 9, 10, 11, 12, 13 or 14 consecutive ribonucleotides starting at the ultimate or penultimate position of the 5′ terminus of (N)ₓ, preferably starting at the 5′ penultimate position, and 2, 3, 4, 5, 6, 7, 8, 9, 10, 11, 12, 13 or 14 consecutive ribonucleotides starting at the ultimate or penultimate position of the 3′ terminus of (N′)y are linked by 2′-5′ internucleotide linkages.

[0172] According to various embodiments of Structure (E), 2, 3, 4, 5, 6, 7, 8, 9, 10, 11, 12, 13 or 14 consecutive nucleotides starting at the ultimate or penultimate position of the 5′ terminus of (N)x, preferably starting at the 5′ penultimate position, and 2, 3, 4, 5, 6, 7, 8, 9, 10, 11, 12, 13 or 14 consecutive nucleotides starting at the ultimate or penultimate position of the 3′ terminus of (N′)y are independently mirror nucleotides. In some embodiments the mirror is an L-ribonucleotide. In other embodiments the mirror nucleotide is L-deoxyribonucleotide.

[0173] In other embodiments of Structure (E), 2, 3, 4, 5, 6, 7, 8, 9, 10, 11, 12, 13 or 14 consecutive ribonucleotides starting at the ultimate or penultimate position of the 5′ terminus of (N)x, preferably starting at the 5′ penultimate position, and 2, 3, 4, 5, 6, 7, 8, 9, 10, 11, 12, 13 or 14 consecutive ribonucleotides starting at the ultimate or penultimate position of the 3′ terminus of (N′)y are independently 2′ sugar modified nucleotides. In some embodiments the 2′ sugar modification comprises an amino, a fluoro, an alkoxy or an alkyl moiety. In certain embodiments the 2′ sugar modification comprises a methoxy moiety (2′-OMe).

[0174] In some embodiments of Structure (E), 2, 3, 4, 5, 6, 7, 8, 9, 10, 11, 12, 13 or 14 consecutive ribonucleotides starting at the ultimate or penultimate position of the 5′ terminus of (N)x, preferably starting at the 5′ penultimate position, and 2, 3, 4, 5, 6, 7, 8, 9, 10, 11, 12, 13 or 14 consecutive ribonucleotides starting at the ultimate or penultimate position of the 3′ terminus of (N′)y are independently a bicyclic nucleotide. In various embodiments the bicyclic nucleotide is a locked nucleic acid (LNA) such as a 2′-O, 4′-C-ethylene-bridged nucleic acid (ENA).

[0175] In various embodiments of Structure (E), (N′)y comprises modified nucleotides selected from a bicyclic nucleotide, a 2′ sugar modified nucleotide, a mirror nucleotide, an altritol nucleotide, a nucleotide joined to an adjacent nucleotide by an internucleotide linkage selected from a 2′-5′ phosphodiester bond, a P-alkoxy linkage or a PACE linkage at the 3′ terminus or at each of the 3′ and 5′ termini.

[0176] In various embodiments of Structure (E), (N)x comprises a modified nucleotide selected from a bicyclic nucleotide, a 2′ sugar modified nucleotide, a mirror nucleotide, an altritol nucleotide, or a nucleotide joined to an adjacent nucleotide by an internucleotide linkage selected from a 2′-5′ phosphodiester bond, a P-alkoxy linkage or a PACE linkage at the 5′ terminus or at each of the 3′ and 5′ termini.

[0177] In one embodiment where both 3′ and 5′ termini of the same strand comprise a modified nucleotide, the modification at the 5′ and 3′ termini is identical. In another embodiment, the modification at the 5′ terminus is different from the modification at the 3′ terminus of the same strand. In one specific embodiment, the modified nucleotides at the 5′ terminus are mirror nucleotides and the modified nucleotides at the 3′ terminus of the same strand are joined by 2′-5′ phosphodiester bond.

[0178] In various embodiments of Structure (E), the modified nucleotides in (N)x are different from the modified nucleotides in (N′)y. For example, the modified nucleotides in (N)x are 2′ sugar modified nucleotides and the modified nucleotides in (N′)y are nucleotides linked by 2′-5′ internucleotide linkages. In another example, the modified nucleotides in (N)x are mirror nucleotides and the modified nucleotides in (N′)y are nucleotides linked by 2′-5′ internucleotide linkages. In another example, the modified nucleotides in (N)x are nucleotides linked by 2′-5′ internucleotide linkages and the modified nucleotides in (N′)y are mirror nucleotides.

[0179] In additional embodiments, the present invention provides a compound having Structure (F):

| | | |
|---|---|---|
| (F) | 5′ (N)x-Z 3′ | antisense strand |
| | 3′ Z′-(N′)y 5′ | sense strand |

wherein each of N and N′ is a nucleotide selected from an unmodified ribonucleotide, a modified ribonucleotide, an unmodified deoxyribonucleotide or a modified deoxyribonucleotide;
wherein each of (N)x and (N′)y is an oligomer in which each consecutive nucleotide is joined to the next nucleotide by a covalent bond and each of x and y is independently an integer between 18 and 40;
wherein each of (N)x and (N′)y comprise unmodified ribonucleotides in which each of (N)x and (N′)y independently comprise one modified nucleotide at the 3′ terminal or penultimate position wherein the modified nucleotide is selected from the group consisting of a bicyclic nucleotide, a 2′ sugar modified nucleotide, a mirror nucleotide, a nucleotide joined to an adjacent nucleotide by a P-alkoxy backbone modification or a PACE linkage or a nucleotide joined to an adjacent nucleotide by a 2′-5′ phosphodiester bond;
wherein in each of (N)x and (N′)y modified and unmodified nucleotides are not alternating;
wherein each of Z and Z′ may be present or absent, but if present is 1-5 deoxyribonucleotides covalently attached at the 3′ terminus of any oligomer to which it is attached;
wherein the sequence of (N′)y is a sequence substantially complementary to (N)x; and wherein the sequence of (N)ₓ comprises an antisense sequence substantially complementary to about 18 to about 40 consecutive ribonucleotides in a RTP801 mRNA. Preferably (N)ₓ comprises an antisense sequence substantially identical to an antisense sequence set forth in any one of Tables A-I.

[0180] In some embodiments of Structure (F), x=y=19 or x=y=23; (N′)y comprises unmodified ribonucleotides in which two consecutive nucleotides at the 3′ terminus comprise two consecutive mirror deoxyribonucleotides; and (N)x comprises unmodified ribonucleotides in which one nucleotide at the 3′ terminus comprises a mirror deoxyribonucleotide (set forth as Structure III).

[0181] According to various embodiments of Structure (F), 2, 3, 4, 5, 6, 7, 8, 9, 10, 11, 12, 13 or 14 consecutive ribonucleotides independently beginning at the ultimate or penultimate position of the 3′ termini of (N)x and (N′)y are linked by 2′-5′ internucleotide linkages.

[0182] According to one preferred embodiment of Structure (F), three consecutive nucleotides at the 3′ terminus of (N′)y are joined by two 2′-5′ phosphodiester bonds and three consecutive nucleotides at the 3′ terminus of (N′)x are joined by two 2′-5′ phosphodiester bonds.

[0183] According to various embodiments of Structure (F), 2, 3, 4, 5, 6, 7, 8, 9, 10, 11, 12, 13 or 14 consecutive nucleotides independently beginning at the ultimate or penultimate position of the 3′ termini of (N)x and (N′)y are independently mirror nucleotides. In some embodiments the mirror nucleotide is an L-ribonucleotide. In other embodiments the minor nucleotide is an L-deoxyribonucleotide.

[0184] In other embodiments of Structure (F), 2, 3, 4, 5, 6, 7, 8, 9, 10, 11, 12, 13 or 14 consecutive ribonucleotides independently beginning at the ultimate or penultimate position of the 3′ termini of (N)x and (N′)y are independently 2′ sugar modified nucleotides. In some embodiments the 2′ sugar modification comprises an amino, a fluoro, an alkoxy or an alkyl moiety. In certain embodiments the 2′ sugar modification comprises a methoxy moiety (2′-OMe).

[0185] In some embodiments of Structure (F), 2, 3, 4, 5, 6, 7, 8, 9, 10, 11, 12, 13 or 14 consecutive ribonucleotides independently beginning at the ultimate or penultimate position of the 3′ termini of (N)x and (N′)y are independently a bicyclic nucleotide. In various embodiments the bicyclic nucleotide is a locked nucleic acid (LNA) such as a 2′-O, 4′-C-ethylene-bridged nucleic acid (ENA).

[0186] In various embodiments of Structure (F), (N′)y comprises a modified nucleotide selected from a bicyclic nucleotide, a 2′ sugar modified nucleotide, a minor nucleotide, an altritol nucleotide, or a nucleotide joined to an adjacent nucleotide by an internucleotide linkage selected from a 2′-5′ phosphodiester bond, a P-alkoxy linkage or a PACE linkage at the 3′ terminus or at both the 3′ and 5′ termini.

[0187] In various embodiments of Structure (F), (N)x comprises a modified nucleotide selected from a bicyclic nucleotide, a 2′ sugar modified nucleotide, a mirror nucleotide, an altritol nucleotide, or a nucleotide joined to an adjacent nucleotide by an internucleotide linkage selected from a 2′-5′ phosphodiester bond, a P-alkoxy linkage or a PACE linkage at the 3′ terminus or at each of the 3′ and 5′ termini.

[0188] In one embodiment where each of 3′ and 5′ termini of the same strand comprise a modified nucleotide, the modification at the 5′ and 3′ termini is identical. In another embodiment, the modification at the 5′ terminus is different from the modification at the 3′ terminus of the same strand. In one specific embodiment, the modified nucleotides at the 5′ terminus are mirror nucleotides and the modified nucleotides at the 3′ terminus of the same strand are joined by 2′-5′ phosphodiester bond.

[0189] In various embodiments of Structure (F), the modified nucleotides in (N)x are different from the modified nucleotides in (N′)y. For example, the modified nucleotides in (N)x are 2′ sugar modified nucleotides and the modified nucleotides in (N′)y are nucleotides linked by 2′-5′ internucleotide linkages. In another example, the modified nucleotides in (N)x are mirror nucleotides and the modified nucleotides in (N′)y are nucleotides linked by 2′-5′ internucleotide linkages. In another example, the modified nucleotides in (N)x are nucleotides linked by 2′-5′ internucleotide linkages and the modified nucleotides in (N′)y are mirror nucleotides.

[0190] In additional embodiments, the present invention provides a compound having Structure (G)

| | | |
|---|---|---|
| (G) | 5′ (N)x-Z 3′ | antisense strand |
| | 3′ Z′-(N′)y 5′ | sense strand |

wherein each of N and N′ is a nucleotide selected from an unmodified ribonucleotide, a modified ribonucleotide, an unmodified deoxyribonucleotide or a modified deoxyribonucleotide;
wherein each of (N)x and (N′)y is an oligomer in which each consecutive nucleotide is joined to the next nucleotide by a covalent bond and each of x and y is independently an integer between 18 and 40;
wherein each of (N)x and (N′)y comprise unmodified ribonucleotides in which each of (N)x and (N′)y independently comprise one modified nucleotide at the 5′ terminal or penultimate position wherein the modified nucleotide is selected from the group consisting of a bicyclic nucleotide, a 2′ sugar modified nucleotide, a mirror nucleotide, a nucleotide joined to an adjacent nucleotide by a P-alkoxy backbone modification or a PACE linkage or a nucleotide joined to an adjacent nucleotide by a 2′-5′ phosphodiester bond;
wherein for (N)x the modified nucleotide is preferably at penultimate position of the 5′ terminal;
wherein in each of (N)x and (N′)y modified and unmodified nucleotides are not alternating;
wherein each of Z and Z′ may be present or absent, but if present is 1-5 deoxyribonucleotides covalently attached at the 3′ terminus of any oligomer to which it is attached;
wherein the sequence of (N′)_{y} is a sequence substantially complementary to (N)x; and wherein the sequence of (N)ₓ comprises an antisense sequence substantially complementary to about 18 to about 40 consecutive ribonucleotides in a RTP801 mRNA. Preferably (N)ₓ comprises an antisense sequence substantially identical to an antisense sequence set forth in any one of Tables A-I.

[0191] In some embodiments of Structure (G), x=y=19 or x=y=23.

[0192] According to various embodiments of Structure (G), 2, 3, 4, 5, 6, 7, 8, 9, 10, 11, 12, 13 or 14 consecutive ribonucleotides independently beginning at the ultimate or penultimate position of the 5′ termini of (N)x and (N′)y are linked by 2′-5′ internucleotide linkages. For (N)x the modified nucleotides preferably start at the penultimate position of the 5′ terminal.

[0193] According to various embodiments of Structure (G), 2, 3, 4, 5, 6, 7, 8, 9, 10, 11, 12, 13 or 14 consecutive nucleotides independently beginning at the ultimate or penultimate position of the 5′ termini of (N)x and (N′)y are independently mirror nucleotides. In some embodiments the mirror nucleotide is an L-ribonucleotide. In other embodiments the mirror nucleotide is an L-deoxyribonucleotide. For (N)x the modified nucleotides preferably start at the penultimate position of the 5′ terminal.

[0194] In other embodiments of Structure (G), 2, 3, 4, 5, 6, 7, 8; 9, 10, 11, 12, 13 or 14 consecutive ribonucleotides independently beginning at the ultimate or penultimate position of the 5′ termini of (N)x and (N′)y are independently 2′ sugar modified nucleotides. In some embodiments the 2′ sugar modification comprises an amino, a fluoro, an alkoxy or an alkyl moiety. In certain embodiments the 2′ sugar modification comprises a methoxy moiety (2′-OMe). In some preferred embodiments the consecutive modified nucleotides preferably begin at the penultimate position of the 5′ terminus of (N)x.

[0195] In one preferred embodiment of Structure (G), five consecutive ribonucleotides at the 5′ terminus of (N′)y comprise a 2′-O-methyl modification and one ribonucleotide at the 5′ penultimate position of (N′)x comprises a 2′-O-methyl modification. In another preferred embodiment of Structure (G), five consecutive ribonucleotides at the 5′ terminus of (N′)y comprise a 2′-O-methyl modification and two consecutive ribonucleotides at the 5′ terminal position of (N′)x comprise a 2′-O-methyl modification.

[0196] In some embodiments of Structure (G), 2, 3, 4, 5, 6, 7, 8, 9, 10, 11, 12, 13 or 14 consecutive ribonucleotides independently beginning at the ultimate or penultimate position of the 5′ termini of (N)x and (N′)y are bicyclic nucleotides. In various embodiments the bicyclic nucleotide is a locked nucleic acid (LNA) such as a 2′-O, 4′-C-ethylene-bridged nucleic acid (ENA). In some preferred embodiments the consecutive modified nucleotides preferably begin at the penultimate position of the 5′ terminus of (N)x.

[0197] In various embodiments of Structure (G), (N′)y comprises a modified nucleotide selected from a bicyclic nucleotide, a 2′ sugar modified nucleotide, a mirror nucleotide, an altritol nucleotide, or a nucleotide joined to an adjacent nucleotide by an internucleotide linkage selected from a 2′-5′ phosphodiester bond, a P-alkoxy linkage or a PACE linkage at the 5′ terminus or at each of the 3′ and 5′ termini.

[0198] In various embodiments of Structure (G), (N)x comprises a modified nucleotide selected from a bicyclic nucleotide, a 2′ sugar modified nucleotide, a mirror nucleotide, an altritol nucleotide, or a nucleotide joined to an adjacent nucleotide by an internucleotide linkage selected from a 2′-5′ phosphodiester bond, a P-alkoxy linkage or a PACE linkage at the 5′ terminus or at each of the 3′ and 5′ termini.

[0199] In one embodiment where each of 3′ and 5′ termini of the same strand comprise a modified nucleotide, the modification at the 5′ and 3′ termini is identical. In another embodiment, the modification at the 5′ terminus is different from the modification at the 3′ terminus of the same strand. In one specific embodiment, the modified nucleotides at the 5′ terminus are mirror nucleotides and the modified nucleotides at the 3′ terminus of the same strand are joined by 2′-5′ phosphodiester bond. In various embodiments of Structure (G), the modified nucleotides in (N)x are different from the modified nucleotides in (N′)y. For example, the modified nucleotides in (N)x are 2′ sugar modified nucleotides and the modified nucleotides in (N′)y are nucleotides linked by 2′-5′ internucleotide linkages. In another example, the modified nucleotides in (N)x are mirror nucleotides and the modified nucleotides in (N′)y are nucleotides linked by 2′-5′ internucleotide linkages. In another example, the modified nucleotides in (N)x are nucleotides linked by 2′-5′ internucleotide linkages and the modified nucleotides in (N′)y are minor nucleotides.

[0200] In additional embodiments, the present invention provides a compound having Structure (H):

| | | |
|---|---|---|
| (H) | 5′ (N)x-Z 3′ | antisense strand |
| | 3′ Z′-(N′)y 5′ | sense strand |

wherein each of N and N′ is a nucleotide selected from an unmodified ribonucleotide, a modified ribonucleotide, an unmodified deoxyribonucleotide or a modified deoxyribonucleotide;
wherein each of (N)x and (N′)y is an oligomer in which each consecutive nucleotide is joined to the next nucleotide by a covalent bond and each of x and y is independently an integer between 18 and 40;
wherein (N)x comprises unmodified ribonucleotides further comprising one modified nucleotide at the 3′ terminal or penultimate position or the 5′ terminal or penultimate position, wherein the modified nucleotide is selected from the group consisting of a bicyclic nucleotide, a 2′ sugar modified nucleotide, a mirror nucleotide, an altritol nucleotide, or a nucleotide joined to an adjacent nucleotide by an internucleotide linkage selected from a 2′-5′ phosphodiester bond, a P-alkoxy linkage or a PACE linkage;
wherein (N′)y comprises unmodified ribonucleotides further comprising one modified nucleotide at an internal position, wherein the modified nucleotide is selected from the group consisting of a bicyclic nucleotide, a 2′ sugar modified nucleotide, a mirror nucleotide, an altritol nucleotide, or a nucleotide joined to an adjacent nucleotide by an internucleotide linkage selected from a 2′-5′ phosphodiester bond, a P-alkoxy linkage or a PACE linkage;
wherein in each of (N)x and (N′)y modified and unmodified nucleotides are not alternating;
wherein each of Z and Z′ may be present or absent, but if present is 1-5 deoxyribonucleotides covalently attached at the 3′ terminus of any oligomer to which it is attached;
wherein the sequence of (N′)y is a sequence substantially complementary to (N)x; and wherein the sequence of (N)x comprises an antisense sequence substantially complementary to about 18 to about 40 consecutive ribonucleotides in a RTP801 mRNA. Preferably (N)x comprises an antisense sequence substantially identical to an antisense sequence set forth in any one of Tables A-I.

[0201] In one embodiment of Structure (H), 2, 3, 4, 5, 6, 7, 8, 9, 10, 11, 12, 13 or 14 consecutive ribonucleotides independently beginning at the ultimate or penultimate position of the 3′ terminus or the 5′ terminus or both termini of (N)x are independently 2′ sugar modified nucleotides, bicyclic nucleotides, mirror nucleotides, altritol nucleotides or nucleotides joined to an adjacent nucleotide by a 2′-5′ phosphodiester bond and 2, 3, 4, 5, 6, 7, 8, 9, 10, 11, 12, 13 or 14 consecutive internal ribonucleotides in (N′)y are independently 2′ sugar modified nucleotides, bicyclic nucleotides, mirror nucleotides, altritol nucleotides or nucleotides joined to an adjacent nucleotide by a 2′-5′ phosphodiester bond. In some embodiments the 2′ sugar modification comprises an amino, a fluoro, an alkoxy or an alkyl moiety. In certain embodiments the 2′ sugar modification comprises a methoxy moiety (2′-OMe).

[0202] In another embodiment of Structure (H), 2, 3, 4, 5, 6, 7, 8, 9, 10, 11, 12, 13 or 14 consecutive ribonucleotides independently beginning at the ultimate or penultimate position of the 3′ terminus or the 5′ terminus or 2-8 consecutive nucleotides at each of 5′ and 3′ termini of (N′)y are independently 2′ sugar modified nucleotides, bicyclic nucleotides, mirror nucleotides, altritol nucleotides or nucleotides joined to an adjacent nucleotide by a 2′-5′ phosphodiester bond, and 2, 3, 4, 5, 6, 7, 8, 9, 10, 11, 12, 13 or 14 consecutive internal ribonucleotides in (N)x are independently 2′ sugar modified nucleotides, bicyclic nucleotides, mirror nucleotides, altritol nucleotides or nucleotides joined to an adjacent nucleotide by a 2′-5′ phosphodiester bond.

[0203] In one embodiment wherein each of 3′ and 5′ termini of the same strand comprises a modified nucleotide, the modification at the 5′ and 3′ termini is identical. In another embodiment, the modification at the 5′ terminus is different from the modification at the 3′ terminus of the same strand. In one specific embodiment, the modified nucleotides at the 5′ terminus are mirror nucleotides and the modified nucleotides at the 3′ terminus of the same strand are joined by 2′-5′ phosphodiester bond.

[0204] In various embodiments of Structure (H), the modified nucleotides in (N)x are different from the modified nucleotides in (N′)y. For example, the modified nucleotides in (N)x are 2′ sugar modified nucleotides and the modified nucleotides in (N′)y are nucleotides linked by 2′-5′ internucleotide linkages. In another example, the modified nucleotides in (N)x are mirror nucleotides and the modified nucleotides in (N′)y are nucleotides linked by 2′-5′ internucleotide linkages. In another example, the modified nucleotides in (N)x are nucleotides linked by 2′-5′ internucleotide linkages and the modified nucleotides in (N′)y are mirror nucleotides.

[0205] In one preferred embodiment of Structure (H), x=y=19; three consecutive ribonucleotides at the 9-11 nucleotide positions of (N′)y comprise 2′-O-methyl modification and five consecutive ribonucleotides at the 3′ terminal position of (N′)x comprise 2′-O-methyl modification.

[0206] For all the above Structures (A)-(H), in various embodiments x=y and each of x and y is and integer selected from the group consisting of 19, 20, 21, 22 and 23. In certain embodiments, x=y=19. In other embodiments x=y=21. In additional embodiments the compounds of the invention comprise modified ribonucleotides in alternating positions wherein each N at the 5′ and 3′ termini of (N)x is modified in its sugar residue and the middle ribonucleotide is not modified, e.g. ribonucleotide in position 10 in a 19-mer strand, position 11 in a 21-mer and position 12 in a 23-mer strand.

[0207] In some embodiments where x=y=21 or x=y=23 the position of modifications in the 19-mer are adjusted for a 21- or 23-mer oligonucleotide with the proviso that the middle nucleotide of the antisense strand is preferably not modified.

[0208] In some embodiments, neither (N)x nor (N′)y are phosphorylated at the 3′ and 5′ termini. In other embodiments either or both (N)x and (N′)y are phosphorylated at the 3′ termini. In yet another embodiment, either or both (N)x and (N′)y are phosphorylated at the 3′ termini using non-cleavable phosphate groups. In yet another embodiment, either or both (N)x and (N′)y are phosphorylated at the terminal 5′ termini position using cleavable or non-cleavable phosphate groups. In some embodiments the siRNA compounds are blunt ended and are non-phosphorylated at the termini; however, comparative experiments have shown that siRNA compounds phosphorylated at one or both of the 3′-termini have similar activity in vivo compared to the non-phosphorylated compounds.

[0209] In certain embodiments for all the above-mentioned Structures, the siRNA compound is blunt ended, for example wherein both Z and Z′ are absent. In an alternative embodiment, the compound comprises at least one 3′ overhang, wherein at least one of Z or Z′ is present. Z and Z′ independently comprises one or more covalently linked modified or non-modified nucleotides, for example inverted dT or dA; dT, LNA, mirror nucleotide and the like. In some embodiments each of Z and Z′ are independently selected from dT and dTdT. siRNA in which Z and/or Z′ is present have similar activity and stability as siRNA in which Z and Z′ are absent.

[0210] In certain embodiments for all the above-mentioned Structures, the siRNA compound comprises one or more phosphonocarboxylate and/or phosphinocarboxylate nucleotides (PACE nucleotides). In some embodiments the PACE nucleotides are deoxyribonucleotides and the phosphinocarboxylate nucleotides are phosphinoacetate nucleotides.

[0211] In certain embodiments for all the above-mentioned Structures, the siRNA compound comprises one or more locked nucleic acids (LNA) also defined as bridged nucleic acids or bicyclic nucleotides. Preferred locked nucleic acids are 2′-O, 4′-C-ethylene nucleosides (ENA) or 2′-O, 4′-C-methylene nucleosides. Other examples of LNA and ENA nucleotides are disclosed in WO 98/39352, WO 00/47599 and WO 99/14226, all incorporated herein by reference.

[0212] In certain embodiments for all the above-mentioned Structures, the compound comprises one or more altritol monomers (nucleotides), also defined as 1,5 anhydro-2-deoxy-D-altrito-hexitol (see for example, Allart, et al., 1998. Nucleosides & Nucleotides 17:1523-1526; Herdewijn et al., 1999. Nucleosides & Nucleotides 18:1371-1376; Fisher et al., 2007, NAR 35(4):1064-1074; all incorporated herein by reference).

[0213] The present invention explicitly excludes compounds in which each of N and/or N′ is a deoxyribonucleotide (d-A, d-C, d-G, d-T). In certain embodiments (N)x and (N′)y may comprise independently 1, 2, 3, 4, 5, 6, 7, 8, 9 or more deoxyribonucleotides. In certain embodiments the present invention provides a compound wherein each of N is an unmodified ribonucleotide and the 3′ terminal nucleotide or 2, 3, 4, 5, 6, 7, 8, 9, 10, 11, 12, 13 or 14 consecutive nucleotides at the 3′ terminus of (N′)y are deoxyribonucleotides. In yet other embodiments each of N is an unmodified ribonucleotide and the 5′ terminal nucleotide or 2, 3, 4, 5, 6, 7, 8, 9, 10, 11, 12, 13 or 14 consecutive nucleotides at the 5′ terminus of (N′)y are deoxyribonucleotides. In further embodiments the 5′ terminal nucleotide or 2, 3, 4, 5, 6, 7, 8, or 9 consecutive nucleotides at the 5′ terminus and 1, 2, 3, 4, 5, or 6 consecutive nucleotides at the 3′ termini of (N)x are deoxyribonucleotides and each of N′ is an unmodified ribonucleotide. In yet further embodiments (N)x comprises unmodified ribonucleotides and 1 or 2, 3 or 4 consecutive deoxyribonucleotides independently at each of the 5′ and 3′ termini and 1 or 2, 3, 4, 5 or 6 consecutive deoxyribonucleotides in internal positions; and each of N′ is an unmodified ribonucleotide. In certain embodiments the 3′ terminal nucleotide or 2, 3, 4, 5, 6, 7, 8, 9, 10, 11, 12 13 or 14 consecutive nucleotides at the 3′ terminus of (N′)y and the terminal 5′ nucleotide or 2, 3, 4, 5, 6, 7, 8, 9, 10, 11, 12 13 or 14 consecutive nucleotides at the 5′ terminus of (N)x are deoxyribonucleotides. The present invention excludes compounds in which each of N and/or N′ is a deoxyribonucleotide. In some embodiments the 5′ terminal nucleotide of N or 2 or 3 consecutive of N and 1, 2, or 3 of N′ is a deoxyribonucleotide. Certain examples of active DNA/RNA siRNA chimeras are disclosed in US patent publication 2005/0004064, and Ui-Tei, 2008 (NAR 36(7):2136-2151) incorporated herein by reference in their entirety.

[0214] Unless otherwise indicated, in preferred embodiments of the structures discussed herein the covalent bond between each consecutive N and N′ is a phosphodiester bond.

[0215] A covalent bond refers to an internucleotide linkage linking one nucleotide monomer to an adjacent nucleotide monomer. A covalent bond includes for example, a phosphodiester bond, a phosphorothioate bond, a P-alkoxy bond, a P-carboxy bond and the like. The normal internucleoside linkage of RNA and DNA is a 3′ to 5′ phosphodiester linkage. In certain preferred embodiments a covalent bond is a phosphodiester bond. Covalent bond encompasses non-phosphorous-containing internucleoside linkages, such as those disclosed in WO 2004/041924 inter alia. Unless otherwise indicated, in preferred embodiments of the structures discussed herein the covalent bond between each consecutive N and N′ is a phosphodiester bond.

[0216] For all of the structures above, in some embodiments the oligonucleotide sequence of (N)x is fully complementary to the oligonucleotide sequence of (N′)y. In other embodiments (N)x and (N′)y are substantially complementary. In certain embodiments (N)x is fully complementary to a RTP801 mRNA. In other embodiments (N)x is substantially complementary to a RTP801 mRNA.

[0217] In some embodiments, neither (N)x nor (N′)y are phosphorylated at the 3′ and 5′ termini. In other embodiments either or both (N)x and (N′)y are phosphorylated at the 3′ termini (3′ Pi). In yet another embodiment, either or both (N)x and (N′)y are phosphorylated at the 3′ termini with non-cleavable phosphate groups. In yet another embodiment, either or both (N)x and (N′)y are phosphorylated at the terminal 2′ termini position using cleavable or non-cleavable phosphate groups. Further, the inhibitory nucleic acid molecules of the present invention may comprise one or more gaps and/or one or more nicks and/or one or more mismatches. Without wishing to be bound by theory, gaps, nicks and mismatches have the advantage of partially destabilizing the nucleic acid/siRNA, so that it may be more easily processed by endogenous cellular machinery such as DICER, DROSHA or RISC into its inhibitory components.

[0218] In the context of the present invention, a gap in a nucleic acid refers to the absence of one or more internal nucleotides in one strand, while a nick in a nucleic acid refers to the absence of an internucleotide linkage between two adjacent nucleotides in one strand. Any of the molecules of the present invention may contain one or more gaps and/or one or more nicks.

[0219] In one aspect the present invention provides a compound having Structure (I):

| | | |
|---|---|---|
| (I) | 5′ (N)x-Z 3′ | (antisense strand) |
| | 3′ Z′-(N′)y-z″ 5′ | (sense strand) |

wherein each of N and N′ is a ribonucleotide which may be unmodified or modified, or an unconventional moiety;
wherein each of (N)x and (N′)y is an oligonucleotide in which each consecutive N or N′ is joined to the next N or N′ by a covalent bond;
wherein Z and Z′ may be present or absent, but if present is independently 1-5 consecutive nucleotides covalently attached at the 3′ terminus of the strand in which it is present;
wherein z″ may be present or absent, but if present is a capping moiety covalently attached at the 5′ terminus of (N′)y;
wherein x=18 to 27;
wherein y=18 to 27;
wherein (N)x comprises modified and unmodified ribonucleotides, each modified ribonucleotide having a 2′-O-methyl on its sugar, wherein N at the 3′ terminus of (N)x is a modified ribonucleotide, (N)x comprises at least five alternating modified ribonucleotides beginning at the 3′ end and at least nine modified ribonucleotides in total and each remaining N is an unmodified ribonucleotide;
wherein in (N′)y at least one unconventional moiety is present, which unconventional moiety may be an abasic ribose moiety, an abasic deoxyribose moiety, a modified or unmodified deoxyribonucleotide, a mirror nucleotide, and a nucleotide joined to an adjacent nucleotide by a 2′-5′ internucleotide phosphate bond; and
wherein the sequence of (N′)y is a sequence substantially complementary to (N)x; and wherein the sequence of (N)x comprises an antisense sequence substantially complementary to 18 to 27 consecutive ribonucleotides in a RTP801 mRNA. Preferably (N)x comprises an antisense sequence substantially identical to an antisense sequence set forth in any one of Tables A-I.

[0220] In some embodiments x=y=19. In other embodiments x=y=21. In some embodiments the at least one unconventional moiety is present at positions 15, 16, 17, or 18 in (N′)y. In some embodiments the unconventional moiety is selected from a mirror nucleotide, an abasic ribose moiety and an abasic deoxyribose moiety. In some preferred embodiments the unconventional moiety is a mirror nucleotide, preferably an L-DNA moiety. In some embodiments an L-DNA moiety is present at position 17, position 18 or positions 17 and 18.

[0221] In other embodiments the unconventional moiety is an abasic moiety. In various embodiments (N′)y comprises at least five abasic ribose moieties or abasic deoxyribose moieties.

[0222] In yet other embodiments (N′)y comprises at least five abasic ribose moieties or abasic deoxyribose moieties and at least one of N′ is an LNA.

[0223] In some embodiments (N)x comprises nine alternating modified ribonucleotides. In other embodiments of Structure (I) (N)x comprises nine alternating modified ribonucleotides further comprising a 2′O modified nucleotide at position 2. In some embodiments (N)x comprises 2′O Me modified ribonucleotides at the odd numbered positions 1, 3, 5, 7, 9, 11, 13, 15, 17, 19. In other embodiments (N)x further comprises a 2′O Me modified ribonucleotide at one or both of positions 2 and 18. In yet other embodiments (N)x comprises 2′O Me modified ribonucleotides at positions 2, 4, 6, 8, 11, 13, 15, 17, 19.

[0224] In various embodiments z″ is present and is selected from an abasic ribose moiety, a deoxyribose moiety; an inverted abasic ribose moiety, a deoxyribose moiety; C6-amino-Pi; a mirror nucleotide.

[0225] In another aspect the present invention provides a compound having Structure (J) set forth below:

| | | |
|---|---|---|
| (J) | 5′ (N)x-Z 3′ | (antisense strand) |
| | 3′ Z′-(N′)y-z″ 5′ | (sense strand) |

wherein each of N and N′ is a ribonucleotide which may be unmodified or modified, or an unconventional moiety;
wherein each of (N)x and (N′)y is an oligonucleotide in which each consecutive N or N′ is joined to the next N or N′ by a covalent bond;
wherein Z and Z′ may be present or absent, but if present is independently 1-5 consecutive nucleotides covalently attached at the 3′ terminus of the strand in which it is present;
wherein z″ may be present or absent but if present is a capping moiety covalently attached at the 5′ terminus of (N′)y;
wherein x=18 to 27;
wherein y=18 to 27;
wherein (N)x comprises modified or unmodified ribonucleotides, and optionally at least one unconventional moiety;
wherein in (N′)y at least one unconventional moiety is present, which unconventional moiety may be an abasic ribose moiety, an abasic deoxyribose moiety, a modified or unmodified deoxyribonucleotide, a mirror nucleotide, a non-base pairing nucleotide analog or a nucleotide joined to an adjacent nucleotide by a 2′-5′ internucleotide phosphate bond; and
wherein the sequence of (N′)y is a sequence substantially complementary to (N)x; and wherein the sequence of (N)x comprises an antisense sequence substantially complementary to 18 to 27 consecutive ribonucleotides in an RTP801 mRNA. Preferably (N)x comprises an antisense sequence substantially identical to an antisense sequence set forth in any one of Tables A-I.

[0226] In some embodiments x=y=19. In other embodiments x=y=21. In some preferred embodiments (N)x comprises modified and unmodified ribonucleotides, and at least one unconventional moiety.

[0227] In some embodiments in (N)x the N at the 3′ terminus is a modified ribonucleotide and (N)x comprises at least 8 modified ribonucleotides. In other embodiments at least 5 of the at least 8 modified ribonucleotides are alternating beginning at the 3′ end. In some embodiments (N)x comprises an abasic moiety in one of positions 5, 6, 7, 8, 9, 10, 11, 12, 13, 14 or 15.

[0228] In some embodiments the at least one unconventional moiety in (N′)y is present at positions 15, 16, 17, or 18. In some embodiments the unconventional moiety is selected from a mirror nucleotide, an abasic ribose moiety and an abasic deoxyribose moiety. In some preferred embodiments the unconventional moiety is a mirror nucleotide, preferably an L-DNA moiety. In some embodiments an L-DNA moiety is present at position 17, position 18 or positions 17 and 18. In other embodiments the at least one unconventional moiety in (N′)y is an abasic ribose moiety or an abasic deoxyribose moiety.

[0229] In yet another aspect the present invention provides a compound having Structure (K) set forth below:

| | | |
|---|---|---|
| (K) | 5′ (N)ₓ-Z 3′ | (antisense strand) |
| | 3′ Z′-(N′)_{y}-z″ 5′ | (sense strand) |

wherein each of N and N′ is a ribonucleotide which may be unmodified or modified, or an unconventional moiety;
wherein each of (N)x and (N′)y is an oligonucleotide in which each consecutive N or N′ is joined to the next N or N′ by a covalent bond;
wherein Z and Z′ may be present or absent, but if present is independently 1-5 consecutive nucleotides covalently attached at the 3′ terminus of the strand in which it is present;
wherein z″ may be present or absent but if present is a capping moiety covalently attached at the 5′ terminus of (N′)y;
wherein x=18 to 27;
wherein y=18 to 27;
wherein (N)x comprises a combination of modified or unmodified ribonucleotides and unconventional moieties, any modified ribonucleotide having a 2′-O-methyl on its sugar;
wherein (N′)y comprises modified or unmodified ribonucleotides and optionally an unconventional moiety, any modified ribonucleotide having a 2′OMe on its sugar;
wherein the sequence of (N′)y is a sequence substantially complementary to (N)x; and wherein the sequence of (N)x comprises an antisense sequence substantially complementary to 18 to 27 consecutive ribonucleotides in a RTP801 mRNA. Preferably (N)x comprises an antisense sequence substantially identical to an antisense sequence set forth in any one of Tables A-I.

[0230] In some embodiments x=y=19. In other embodiments x=y=21. In some preferred embodiments the at least one unconventional moiety is present in (N)x and is an abasic ribose moiety or an abasic deoxyribose moiety. In other embodiments the at least one unconventional moiety is present in (N)x and is a non-base pairing nucleotide analog. In various embodiments (N′)y comprises unmodified ribonucleotides. In some embodiments (N)x comprises at least five abasic ribose moieties or abasic deoxyribose moieties or a combination thereof. In certain embodiments (N)x and/or (N′)y comprise modified ribonucleotides which do not base pair with corresponding modified or unmodified ribonucleotides in (N′)y and/or (N)x.

[0231] In various embodiments the present invention provides an siRNA set forth in Structure (L):

| | | |
|---|---|---|
| (L) | 5′ (N)ₓ-Z 3′ | (antisense strand) |
| | 3′ Z′-(N′)_{y} 5′ | (sense strand) |

wherein each of N and N′ is a nucleotide selected from an unmodified ribonucleotide, a modified ribonucleotide, an unmodified deoxyribonucleotide and a modified deoxyribonucleotide;
wherein each of (N)ₓ and (N′)_{y} is an oligonucleotide in which each consecutive N or N′ is joined to the next N or N′ by a covalent bond;
wherein Z and Z′ are absent;
wherein x=y=19;
wherein in (N′)y the nucleotide in at least one of positions 15, 16, 17, 18 and 19 comprises a nucleotide selected from an abasic unconventional moiety, a mirror nucleotide, a deoxyribonucleotide and a nucleotide joined to an adjacent nucleotide by a 2′-5′ internucleotide bond;
wherein (N)x comprises alternating modified ribonucleotides and unmodified ribonucleotides each modified ribonucleotide being modified so as to have a 2′-O-methyl on its sugar and the ribonucleotide located at the middle position of (N)x being modified or unmodified, preferably unmodified; and
wherein the sequence of (N′)y is a sequence substantially complementary to (N)x; and wherein the sequence of (N)x comprises an antisense sequence substantially complementary to 18 to 27 consecutive ribonucleotides in a RTP801 mRNA. Preferably (N)x comprises an antisense sequence substantially identical to an antisense sequence set forth in any one of Tables A-I.

[0232] In some embodiments of Structure (L), in (N′)y the nucleotide in one or both of positions 17 and 18 comprises a modified nucleotide selected from an abasic unconventional moiety, a mirror nucleotide and a nucleotide joined to an adjacent nucleotide by a 2′-5′ internucleotide bond. In some embodiments the mirror nucleotide is selected from L-DNA and L-RNA. In various embodiments the mirror nucleotide is L-DNA.

[0233] In various embodiments (N′)y comprises a modified nucleotide at position 15 wherein the modified nucleotide is selected from a mirror nucleotide and a deoxyribonucleotide.

[0234] In certain embodiments (N′)y further comprises a modified nucleotide or pseudo nucleotide at position 2 wherein the pseudo nucleotide may be an abasic unconventional moiety and the modified nucleotide is optionally a mirror nucleotide.

[0235] In various embodiments the antisense strand (N)x comprises 2′O-Me modified ribonucleotides at the odd numbered positions (5′ to 3′; positions 1, 3, 5, 7, 9, 11, 13, 15, 17, 19). In some embodiments (N)x further comprises 2′O-Me modified ribonucleotides at one or both positions 2 and 18. In other embodiments (N)x comprises 2′O Me modified ribonucleotides at positions 2, 4, 6, 8, 11, 13, 15, 17, 19.

[0236] Other embodiments of Structures (L) are envisaged wherein x=y=21; in these embodiments the modifications for (N′)y discussed above instead of being in positions 17 and 18 are in positions 19 and 20 for 21-mer oligonucleotide; similarly the modifications in positions 15, 16, 17, 18 or 19 are in positions 17, 18, 19, 20 or 21 for the 21-mer oligonucleotide. The 2′O Me modifications on the antisense strand are similarly adjusted. In some embodiments (N)x comprises 2′O Me modified ribonucleotides at the odd numbered positions (5′ to 3′; positions 1, 3, 5, 7, 9, 12, 14, 16, 18, 20 for the 21 mer oligonucleotide [nucleotide at position 11 unmodified]). In other embodiments (N)x comprises 2′OMe modified ribonucleotides at positions 2, 4, 6, 8, 10, 12, 14, 16, 18, 20 [nucleotide at position 11 unmodified] for the 21 mer oligonucleotide.

[0237] In some embodiments (N′)y further comprises a 5′ terminal cap nucleotide. In various embodiments the terminal cap moiety is selected from an abasic unconventional moiety, an inverted abasic unconventional moiety, an L-DNA nucleotide, and a C6-imine phosphate (C6 amino linker with phosphate at terminus).

[0238] In other embodiments the present invention provides a compound having Structure (M) set forth below:

| | | |
|---|---|---|
| (M) | 5′ (N)ₓ-Z 3′ | (antisense strand) |
| | 3′ Z′-(N′)_{y} 5′ | (sense strand) |

wherein each of N and N′ is selected from a pseudo-nucleotide and a nucleotide;
wherein each nucleotide is selected from an unmodified ribonucleotide, a modified ribonucleotide, an unmodified deoxyribonucleotide and a modified deoxyribonucleotide;
wherein each of (N)ₓ and (N′)_{y} is an oligonucleotide in which each consecutive N or N′ is joined to the next N or N′ by a covalent bond;
wherein Z and Z′ are absent; wherein x=18 to 27;
wherein y=18 to 27;
wherein the sequence of (N′)y is a sequence substantially complementary to (N)x; and wherein the sequence of (N)x comprises an antisense sequence substantially complementary to 18 to 27 consecutive ribonucleotides in a RTP801 mRNA. Preferably (N)x comprises an antisense sequence substantially identical to an antisense sequence set forth in any one of Tables A-I.

[0239] In other embodiments the present invention provides a double stranded compound having Structure (N) set forth below:

| | | |
|---|---|---|
| (N) | 5′ (N)ₓ-Z 3′ | (antisense strand) |
| | 3′ Z′-(N′)_{y} 5′ | (sense strand) |

wherein each of N and N′ is a nucleotide selected from an unmodified ribonucleotide, a modified ribonucleotide, an unmodified deoxyribonucleotide and a modified deoxyribonucleotide;
wherein each of (N)ₓ and (N′)_{y} is an oligonucleotide in which each consecutive N or N′ is joined to the next N or N′ by a covalent bond;
wherein Z and Z′ are absent;
wherein each of x and y is independently an integer between 18 and 40;
wherein (N)x, (N′)y or (N)x and (N′)y comprise non base-pairing modified nucleotides such that (N)x and (N′)y form less than 15 base pairs in the double stranded compound; and wherein the sequence of (N′)y is a sequence substantially complementary to (N)x; and wherein the sequence of (N)x comprises an antisense sequence substantially complementary to 18 to 40 consecutive ribonucleotides in a RTP801 mRNA. Preferably (N)x comprises an antisense sequence substantially identical to an antisense sequence set forth in any one of Tables A-I.

[0240] In other embodiments the present invention provides a compound having Structure (O) set forth below:

| | | |
|---|---|---|
| (O) | 5′ (N)ₓ-Z 3′ | (antisense strand) |
| | 3′ Z′-(N′)_{y} 5′ | (sense strand) |

wherein each of N is a nucleotide selected from an unmodified ribonucleotide, a modified ribonucleotide, an unmodified deoxyribonucleotide and a modified deoxyribonucleotide;
wherein each of N′ is a nucleotide analog selected from a six membered sugar nucleotide, seven membered sugar nucleotide, morpholino moiety, peptide nucleic acid and combinations thereof;
wherein each of (N)ₓ and (N′)_{y} is an oligonucleotide in which each consecutive N or N′ is joined to the next N or N′ by a covalent bond;
wherein Z and Z′ are absent;
wherein each of x and y is independently an integer between 18 and 40;
wherein the sequence of (N′)y is a sequence substantially complementary to (N)x; and wherein the sequence of (N)x comprises an antisense sequence substantially complementary to 18 to 27 consecutive ribonucleotides in a RTP801 mRNA. Preferably (N)x comprises an antisense sequence substantially identical to an antisense sequence set forth in any one of Tables A-I.

[0241] In other embodiments the present invention provides a compound having Structure (P) set forth below:

| | | |
|---|---|---|
| (P) | 5′ (N)ₓ-Z 3′ | (antisense strand) |
| | 3′ Z′-(N′)_{y} 5′ | (sense strand) |

wherein each of N and N′ is a nucleotide selected from an unmodified ribonucleotide, a modified ribonucleotide, an unmodified deoxyribonucleotide and a modified deoxyribonucleotide;
wherein each of (N)ₓ and (N′)_{y} is an oligonucleotide in which each consecutive N or N′ is joined to the next N or N′ by a covalent bond;
wherein Z and Z′ are absent;
wherein each of x and y is independently an integer between 18 and 40;
wherein one of N or N′ in an internal position of (N)x or (N′)y or one or more of N or N′ at a terminal position of (N)x or (N′)y comprises an abasic moiety or a 2′ modified nucleotide;
wherein the sequence of (N′)y is a sequence substantially complementary to (N)x; and wherein the sequence of (N)x comprises an antisense sequence substantially complementary to 18 to 27 consecutive ribonucleotides in a RTP801 mRNA. Preferably (N)x comprises an antisense sequence substantially identical to an antisense sequence set forth in any one of Tables A-I.

[0242] In various embodiments (N′)y comprises a modified nucleotide at position 15 wherein the modified nucleotide is selected from a mirror nucleotide and a deoxyribonucleotide.

[0243] In certain embodiments (N′)y further comprises a modified nucleotide at position 2 wherein the modified nucleotide is selected from a mirror nucleotide and an abasic unconventional moiety.

[0244] In various embodiments the antisense strand (N)x comprises 2′O-Me modified ribonucleotides at the odd numbered positions (5′ to 3′; positions 1, 3, 5, 7, 9, 11, 13, 15, 17, 19). In some embodiments (N)x further comprises 2′O-Me modified ribonucleotides at one or both positions 2 and 18. In other embodiments (N)x comprises 2′OMe modified ribonucleotides at positions 2, 4, 6, 8, 11, 13, 15, 17, 19.

[0245] An additional novel molecule provided by the present invention is an oligonucleotide comprising consecutive nucleotides wherein a first segment of such nucleotides encode a first inhibitory RNA molecule, a second segment of such nucleotides encode a second inhibitory RNA molecule, and a third segment of such nucleotides encode a third inhibitory RNA molecule. Each of the first, the second and the third segment may comprise one strand of a double stranded RNA and the first, second and third segments may be joined together by a linker. Further, the oligonucleotide may comprise three double stranded segments joined together by one or more linker.

[0246] Thus, one molecule provided by the present invention is an oligonucleotide comprising consecutive nucleotides which encode three inhibitory RNA molecules; said oligonucleotide may possess a triple stranded structure, such that three double stranded arms are linked together by one or more linker, such as any of the linkers presented hereinabove. This molecule forms a “star”-like structure, and may also be referred to herein as RNAstar. Such structures are disclosed in PCT patent publication WO 2007/091269, assigned to the assignee of the present invention and incorporated herein in its entirety by reference.

[0247] Said triple-stranded oligonucleotide may be an oligoribonucleotide having the general structure:

| | | |
|---|---|---|
| 5′ Oligo1 (sense) | LINKER A | Oligo2 (sense) 3′ |
| 3′ Oligo1 (antisense) | LINKER B | Oligo3 (sense) 5′ |
| 3′ Oligo3 (antisense) | LINKER C | Oligo2 (antisense) 5′ |
| Or | | |
| 5′ Oligo1 (sense) | LINKER A | Oligo2 (antisense) 3′ |
| 3′ Oligo1 (antisense) | LINKER B | Oligo3 (sense) 5′ |
| 3′ Oligo3 (antisense) | LINKER C | Oligo2 (sense) 5′ |
| or | | |
| 5′ Oligo1 (sense) | LINKER A | Oligo3 (antisense) 3′ |
| 3′ Oligo1 (antisense) | LINKER B | Oligo2 (sense) 5′ |
| 5′ Oligo3 (sense) | LINKER C | Oligo2 (antisense) 3′ |

wherein one or more of linker A, linker B or linker C is present; any combination of two or more oligonucleotides and one or more of linkers A-C is possible, so long as the polarity of the strands and the general structure of the molecule remains. Further, if two or more of linkers A-C are present, they may be identical or different.

[0248] Thus, a triple-armed structure is formed, wherein each arm comprises a sense strand and complementary antisense strand (i.e. Oligo1 antisense base pairs to Oligo1 sense etc.). The triple armed structure may be triple stranded, whereby each arm possesses base pairing.

[0249] Further, the above triple stranded structure may have a gap instead of a linker in one or more of the strands. Such a molecule with one gap is technically quadruple stranded and not triple stranded; inserting additional gaps or nicks will lead to the molecule having additional strands. Preliminary results obtained by the inventors of the present invention indicate that said gapped molecules are more active in inhibiting the RTP801 target gene than the similar but non-gapped molecules.

[0250] In some embodiments, neither antisense nor sense strands of the novel siRNA compounds of the invention are phosphorylated at the 3′ and 5′ termini. In other embodiments either or both antisense and sense strands are phosphorylated at the 3′ termini. In yet another embodiment, either or both antisense and sense strands are phosphorylated at the 3′ termini using non-cleavable phosphate groups. In yet another embodiment, either or both antisense and sense strands are phosphorylated at the terminal 5′ termini position using cleavable or non-cleavable phosphate groups. In yet another embodiment, either or both antisense and sense strands are phosphorylated at the terminal 2′ termini position using cleavable or non-cleavable phosphate groups. In some embodiments the siRNA compounds are blunt ended and are non-phosphorylated at the termini; however, comparative experiments have shown that siRNA compounds phosphorylated at one or both of the 3′-termini have similar activity in vivo compared to the non-phosphorylated compounds.

[0251] Any siRNA sequence disclosed herein can be prepared having any of the modifications/Structures disclosed herein. The combination of sequence plus structure is novel and can be used in the treatment of the conditions disclosed herein.

[0252] Unless otherwise indicated, in preferred embodiments of the structures discussed herein the covalent bond between each consecutive N and N′ is a phosphodiester bond.

[0253] For all of the structures above, in some embodiments the oligonucleotide sequence of antisense strand is fully complementary to the oligonucleotide sequence of sense. In other embodiments the antisense and sense strands are substantially complementary. In certain embodiments the antisense strand is fully complementary to a RTP801 mRNA. In other embodiments the antisense strand is substantially complementary to a RTP801 mRNA. Preferably the sequence of the antisense strand is substantially identical to an antisense sequence set forth in any one of Tables A-I.

[0254] In some embodiments the present invention provides an expression vector comprising an antisense oligonucleotide disclosed in any one of Tables E-I. In some embodiments the expression vector further comprises a sense oligonucleotide having complementarity to the antisense oligonucleotide. In various embodiments the present invention further provides a cell comprising an expression vector comprising an antisense oligonucleotide disclosed in any one of Tables E-I. The present invention further provides a siRNA expressed in a cell comprising an expression vector comprising an antisense oligonucleotide disclosed in any one of Tables E-I, a pharmaceutical composition comprising same and use thereof for treatment of any one of the diseases and disorders disclosed herein.

[0255] In other embodiments the present invention provides a first expression vector comprising an antisense oligonucleotide disclosed in any one of Tables E-I and a second expression vector comprising a sense oligonucleotide having complementarity to the antisense oligonucleotide comprised in the first expression vector. In various embodiments the present invention further provides a cell comprising a first expression vector comprising an antisense oligonucleotide disclosed in any one of Tables E-I and a second expression vector comprising a sense oligonucleotide having complementarity to the antisense oligonucleotide comprised in the first expression vector. The present invention further provides a siRNA expressed in a cell comprising such first and second expression vector, a pharmaceutical composition comprising same and use thereof for treatment of any one of the diseases and disorders disclosed herein.

siRNA Synthesis

[0256] Using proprietary algorithms and the known sequence of RTP801 gene disclosed herein, the sequences of many potential siRNAs are generated. siRNA molecules according to the above specifications are prepared essentially as described herein.

[0257] The siRNA compounds of the present invention are synthesized by any of the methods that are well known in the art for synthesis of ribonucleic (or deoxyribonucleic) oligonucleotides. Such synthesis is, among others, described in Beaucage and Iyer, Tetrahedron 1992; 48:2223-2311; Beaucage and Iyer, Tetrahedron 1993; 49: 6123-6194 and Caruthers, et. al., Methods Enzymol. 1987; 154: 287-313; the synthesis of thioates is, among others, described in Eckstein, Ann. Rev. Biochem. 1985; 54: 367-402, the synthesis of RNA molecules is described in Sproat, in Humana Press 2005 edited by Herdewijn P.; Kap. 2: 17-31 and respective downstream processes are, among others, described in Pingoud et al., in IRL Press 1989 edited by Oliver R. W. A.; Kap. 7: 183-208.

[0258] Other synthetic procedures are known in the art, e.g. the procedures described in Usman et al., 1987, J. Am. Chem. Soc., 109, 7845; Scaringe et al., 1990, NAR., 18, 5433; Wincott et al., 1995, NAR. 23, 2677-2684; and Wincott et al., 1997, Methods Mol. Bio., 74, 59, may make use of common nucleic acid protecting and coupling groups, such as dimethoxytrityl at the 5′-end, and phosphoramidites at the 3′-end. The modified (e.g. 2′-O-methylated) nucleotides and unmodified nucleotides are incorporated as desired.

[0259] The oligonucleotides of the present invention can be synthesized separately and joined together post-synthetically, for example, by ligation (Moore et al., 1992, Science 256, 9923; Draper et al., International Patent Publication No. WO 93/23569; Shabarova et al., 1991, NAR 19, 4247; Bellon et al., 1997, Nucleosides & Nucleotides, 16, 951; Bellon et al., 1997, Bioconjugate Chem. 8, 204), or by hybridization following synthesis and/or deprotection.

[0260] It is noted that a commercially available machine (available, inter alia, from Applied Biosystems) can be used; the oligonucleotides are prepared according to the sequences disclosed herein. Overlapping pairs of chemically synthesized fragments can be ligated using methods well known in the art (e.g., see U.S. Pat. No. 6,121,426). The strands are synthesized separately and then are annealed to each other in the tube. Then, the double-stranded siRNAs are separated from the single-stranded oligonucleotides that were not annealed (e.g. because of the excess of one of them) by HPLC. In relation to the siRNAs or siRNA fragments of the present invention, two or more such sequences can be synthesized and linked together for use in the present invention.

[0261] The compounds of the invention can also be synthesized via tandem synthesis methodology, as described for example in US Patent Publication No. US 2004/0019001, wherein both siRNA strands are synthesized as a single contiguous oligonucleotide fragment or strand separated by a cleavable linker which is subsequently cleaved to provide separate siRNA fragments or strands that hybridize and permit purification of the siRNA duplex. The linker is selected from a polynucleotide linker or a non-nucleotide linker.

### Pharmaceutical Compositions

[0262] While it is possible for the compounds of the present invention to be administered as the raw chemical, it is preferable to present them as a pharmaceutical composition. Accordingly the present invention provides a pharmaceutical composition comprising one or more of the chemically modified siRNA compounds of the invention; and a pharmaceutically acceptable carrier. In some embodiments the pharmaceutical composition comprises two or more novel siRNA compounds of the invention.

[0263] The invention further provides a pharmaceutical composition comprising at least one compound of the invention covalently or non-covalently bound to one or more compounds of the invention in an amount effective to inhibit the RTP801 gene; and a pharmaceutically acceptable carrier. In some embodiments the siRNA compounds are processed intracellularly by endogenous cellular complexes to produce one or more oligoribonucleotides of the invention.

[0264] The invention further provides a pharmaceutical composition comprising a pharmaceutically acceptable carrier and one or more of the chemically modified siRNA compounds of the invention in an amount effective to inhibit expression in a cell of a RTP801 gene, the compound comprising a sequence which is substantially complementary to the sequence of RTP801 mRNA.

[0265] In some embodiments, the siRNA compounds according to the present invention are the main active component in a pharmaceutical composition. In other embodiments the siRNA compounds according to the present invention are one of the active components of a pharmaceutical composition containing two or more siRNAs, said pharmaceutical composition further being comprised of one or more additional siRNA molecule which targets the RTP801 gene. In other embodiments the siRNA compounds according to the present invention are one of the active components of a pharmaceutical composition containing two or more siRNAs, said pharmaceutical composition further being comprised of one or more additional siRNA molecule which targets one or more additional gene. In some embodiments, simultaneous inhibition of RTP801 gene by two or more siRNA compounds of the invention provides additive or synergistic effect for treatment of the diseases disclosed herein. In some embodiments, simultaneous inhibition of RTP801 gene and said additional gene(s) provides additive or synergistic effect for treatment of the diseases disclosed herein.

[0266] In some embodiments, the siRNA compounds disclosed herein are linked or bound (covalently or non-covalently) to an antibody or aptamer against cell surface internalizable molecules expressed on the target cells, in order to achieve enhanced targeting for treatment of the diseases disclosed herein. In one specific embodiment, anti-Fas antibody (preferably a neutralizing antibody) is combined (covalently or non-covalently) with a siRNA compound according to the present invention. In various embodiments, an aptamer which acts like a ligand/antibody is combined (covalently or non-covalently) with a siRNA compound according to the present invention.

### RNA Interference

[0267] A number of PCT applications have recently been published that relate to the RNAi phenomenon. These include: PCT publication WO 00/44895; PCT publication WO 00/49035; PCT publication WO 00/63364; PCT publication WO 01/36641; PCT publication WO 01/36646; PCT publication WO 99/32619; PCT publication WO 00/44914; PCT publication WO 01/29058; and PCT publication WO 01/75164.

[0268] RNA interference (RNAi) is based on the ability of dsRNA species to enter a cytoplasmic protein complex, where it is then targeted to the complementary cellular RNA and specifically degrade it. The RNA interference response features an endonuclease complex containing a siRNA, commonly referred to as an RNA-induced silencing complex (RISC), which mediates cleavage of single-stranded RNA having a sequence complementary to the antisense strand of the siRNA duplex. Cleavage of the target RNA may take place in the middle of the region complementary to the antisense strand of the siRNA duplex (Elbashir et al., Genes Dev., 2001, 15(2):188-200). In more detail, longer dsRNAs are digested into short (17-29 bp) dsRNA fragments (also referred to as short inhibitory RNAs, “siRNAs”) by type III RNAses (DICER, DROSHA, etc.; Bernstein et al., Nature, 2001, 409(6818):363-6; Lee et al., Nature, 2003, 425(6956):415-9). The RISC protein complex recognizes these fragments and complementary mRNA. The whole process is culminated by endonuclease cleavage of target mRNA (McManus & Sharp, Nature Rev Genet, 2002, 3(10):737-47; Paddison & Hannon, Curr Opin Mol. Ther. 2003, 5(3):217-24). (For additional information on these terms and proposed mechanisms, see for example Bernstein et al., RNA 2001, 7(11):1509-21; Nishikura, Cell 2001, 107(4):415-8 and PCT publication WO 01/36646).

[0269] The selection and synthesis of siRNA corresponding to known genes has been widely reported; see for example Ui-Tei et al., J Biomed Biotechnol. 2006; 2006: 65052; Chalk et al., BBRC. 2004, 319(1): 264-74; Sioud & Leirdal, Met. Mol. Biol.; 2004, 252:457-69; Levenkova et al., Bioinform. 2004, 20(3):430-2; Ui-Tei et al., Nuc. Acid Res. 2004, 32(3):936-48. For examples of the use of, and production of, modified siRNA see Braasch et al., Biochem., 2003, 42(26):7967-75; Chiu et al., RNA, 2003, 9(9):1034-48; PCT publications WO 2004/015107 (Atugen); WO 02/44321 (Tuschl et al), and U.S. Pat. Nos. 5,898,031 and 6,107,094.

### Delivery

[0270] The chemically modified siRNA compound of the invention can is administered as the compound per se (i.e. as naked siRNA) or as pharmaceutically acceptable salt and is administered alone or as an active ingredient in combination with one or more pharmaceutically acceptable carrier, solvent, diluent, excipient, adjuvant and vehicle. In some embodiments, the siRNA molecules of the present invention are delivered to the target tissue by direct application of the naked molecules prepared with a carrier or a diluent.

[0271] The term “naked siRNA” refers to siRNA molecules that are free from any delivery vehicle that acts to assist, promote or facilitate entry into the cell, including viral sequences, viral particles, liposome formulations, lipofectin or precipitating agents and the like. For example, siRNA in PBS is “naked siRNA”.

[0272] Pharmaceutically acceptable carriers, solvents, diluents, excipients, adjuvants and vehicles as well as implant carriers generally refer to inert, non-toxic solid or liquid fillers, diluents or encapsulating material not reacting with the active siRNA compounds of the invention and they include liposomes and microspheres. Formulating the compositions in liposomes may benefit absorption. Additionally, the compositions may include a PFC liquid such as perflubron, and the compositions may be formulated as a complex of the compounds of the invention with polyethylemeimine (PEI). Examples of delivery systems useful in the present invention include U.S. Pat. Nos. 5,225,182; 5,169,383; 5,167,616; 4,959,217; 4,925,678; 4,487,603; 4,486,194; 4,447,233; 4,447,224; 4,439,196; and 4,475,196. Many such implants, delivery systems, and modules are well known to those skilled in the art. In one specific embodiment of this invention topical and transdermal formulations are selected.

[0273] Accordingly, in some embodiments the siRNA molecules of the invention are delivered in liposome formulations and lipofectin formulations and the like and can be prepared by methods well known to those skilled in the art. Such methods are described, for example, in U.S. Pat. Nos. 5,593,972, 5,589,466, and 5,580,859, which are herein incorporated by reference.

[0274] Delivery systems aimed specifically at the enhanced and improved delivery of siRNA into mammalian cells have been developed (see, for example, Shen et al FEBS Let. 539: 111-114 (2003), Xia et al., Nat. Biotech. 20: 1006-1010 (2002), Reich et al., Mol. Vision. 9: 210-216 (2003), Sorensen et al., J. Mol. Biol. 327: 761-766 (2003), Lewis et al., Nat. Gen. 32: 107-108 (2002) and Simeoni et al., NAR 31, 11: 2717-2724 (2003)). siRNA has recently been successfully used for inhibition of gene expression in primates; (for details see for example, Tolentino et al., Retina 2004.24(1):132-138).

[0275] Additional formulations for improved delivery of the compounds of the present invention can include non-formulated compounds, compounds covalently bound to cholesterol, and compounds bound to targeting antibodies (Song et al., Antibody mediated in vivo delivery of small interfering RNAs via cell-surface receptors, Nat. Biotechnol. 2005. 23(6):709-17). Cholesterol-conjugated siRNAs (and other steroid and lipid conjugated siRNAs) can been used for delivery (see for example Soutschek et al Nature. 2004. 432:173-177; and Lorenz et al. Bioorg. Med. Chem. Lett. 2004. 14:4975-4977).

[0276] The naked siRNA or the pharmaceutical compositions comprising the chemically modified siRNA of the present invention are administered and dosed in accordance with good medical practice, taking into account the clinical condition of the individual patient, the disease to be treated, the site and method of administration, scheduling of administration, patient age, sex, body weight and other factors known to medical practitioners.

[0277] A “therapeutically effective dose” for purposes herein is thus determined by such considerations as are known in the art. The dose must be effective to achieve improvement including but not limited to improved survival rate or more rapid recovery, or improvement or elimination of symptoms and other indicators as are selected as appropriate measures by those skilled in the art. The siRNA of the invention can be administered in a single dose or in multiple doses.

[0278] In general, the active dose of compound for humans is in the range of from 1 ng/kg to about 20-100 mg/kg body weight per day, preferably about 0.01 mg to about 2-10 mg/kg body weight per day, in a regimen of one dose per day or twice or three or more times per day for a period of 1-4 weeks or longer.

[0279] The chemically modified siRNA compounds of the present invention can be administered by any of the conventional routes of administration. The chemically modified siRNA compounds are administered orally, subcutaneously or parenterally including intravenous, intraarterial, intramuscular, intraperitoneally, intraocular, transtympanic and intranasal administration as well as intrathecal and infusion techniques. Implants of the compounds are also useful.

[0280] Liquid forms are prepared for invasive administration, e.g. injection or for topical or local administration. The term injection includes subcutaneous, transdermal, intravenous, intramuscular, intrathecal, intraocular, transtympanic and other parental routes of administration. The liquid compositions include aqueous solutions, with and without organic co-solvents, aqueous or oil suspensions, emulsions with edible oils, as well as similar pharmaceutical vehicles. In a particular embodiment, the administration comprises intravenous administration. In some embodiments the compounds of the present invention are formulated as eardrops for topical administration to the ear. In some embodiments the compounds of the present invention are formulated as eye drops for topical administration to the surface of the eye. Further information on administration of the compounds of the present invention can be found in Tolentino et al., Retina 2004. 24:132-138; and Reich et al., Molecular Vision, 2003. 9:210-216.

[0281] In addition, in certain embodiments the compositions for use in the novel treatments of the present invention are formed as aerosols, for example for intranasal administration. In certain embodiments the compositions for use in the novel treatments of the present invention are formed as nasal drops, for example for intranasal instillation.

[0282] The therapeutic compositions of the present invention are preferably administered into the lung by inhalation of an aerosol containing these compositions/compounds, or by intranasal or intratracheal instillation of said compositions. For further information on pulmonary delivery of pharmaceutical compositions see Weiss et al., Human Gene Therapy 1999. 10:2287-2293; Densmore et al., Molecular therapy 1999. 1:180-188; Gautam et al., Molecular Therapy 2001. 3:551-556; and Shahiwala & Misra, AAPS PharmSciTech 2004. 24; 6(3):E482-6. Additionally, respiratory formulations for siRNA are described in U.S. Patent Application Publication No. 2004/0063654. Respiratory formulations for siRNA are described in US Patent Application Publication No. 2004/0063654.

[0283] In certain embodiments, oral compositions (such as tablets, suspensions, solutions) may be effective for local delivery to the oral cavity such as oral composition suitable for mouthwash for the treatment of oral mucositis.

[0284] In a particular embodiment, the chemically modified siRNA compounds of the invention are formulated for intravenous administration for delivery to the kidney for the treatment of kidney disorders, e.g. acute renal failure (ARF), delayed graft function (DGF). It is noted that the delivery of the siRNA compounds according to the present invention to the target cells in the kidney proximal tubules is particularly effective in the treatment of ARF and DGF. Without being bound by theory, this may be due to the fact that normally siRNA molecules are excreted from the body via the cells of the kidney proximal tubules. Thus, naked siRNA molecules concentrate in the cells that are targeted for the therapy in ARF and DGF.

[0285] Delivery of compounds into the brain is accomplished by several methods such as, inter alia, neurosurgical implants, blood-brain barrier disruption, lipid mediated transport, carrier mediated influx or efflux, plasma protein-mediated transport, receptor-mediated transcytosis, absorptive-mediated transcytosis, neuropeptide transport at the blood-brain barrier, and genetically engineering “Trojan horses” for drug targeting. The above methods are performed, for example, as described in “Brain Drug Targeting: the future of brain drug development”, W. M. Pardridge, Cambridge University Press, Cambridge, UK (2001).

[0286] In addition, in certain embodiments the compositions for use in the novel treatments of the present invention are formed as aerosols, for example for intranasal administration.

[0287] Intranasal delivery for the treatment of CNS diseases has been attained with acetylcholinesterase inhibitors such as galantamine and various salts and derivatives of galantamine, for example as described in US Patent Application Publication No. 2006003989 and PCT Applications Publication Nos. WO 2004/002402 and WO 2005/102275. Intranasal delivery of nucleic acids for the treatment of CNS diseases, for example by intranasal instillation of nasal drops, has been described, for example, in PCT Application Publication No. WO 2007/107789.

### Methods of Treatment

[0288] In one aspect the present invention relates to a method of treating a subject suffering from a disorder associated with RTP801 comprising administering to the subject a therapeutically effective amount of an siRNA compound of the present invention. In preferred embodiments the subject being treated is a warm-blooded animal and, in particular, mammal including human.

[0289] “Treating a subject” refers to administering to the subject a therapeutic substance effective to ameliorate symptoms associated with a disease, to lessen the severity or cure the disease, or to prevent the disease from occurring. “Treatment” refers to both therapeutic treatment and prophylactic or preventative measures, wherein the object is to prevent a disorder or reduce the symptoms of a disorder. Those in need of treatment include those already experiencing the disease or condition, those prone to having the disease or condition, and those in which the disease or condition is to be prevented. The compounds of the invention are administered before, during or subsequent to the onset of the disease or condition.

[0290] A “therapeutically effective dose” refers to an amount of a pharmaceutical compound or composition which is effective to achieve an improvement in a subject or his physiological systems including, but not limited to, improved survival rate, more rapid recovery, or improvement or elimination of symptoms, and other indicators as are selected as appropriate determining measures by those skilled in the art.

[0291] The methods of treating the diseases disclosed herein and included in the present invention may include administering a RTP801 siRNA inhibitor in conjunction or in combination with an additional RTP801 inhibitor, a substance which improves the pharmacological properties of the active ingredient (e.g. siRNA) as detailed below, or an additional compound known to be effective in the treatment of a subject suffering from or susceptible to any of the hereinabove mentioned diseases and disorders, such as macular degeneration, COPD, ARF, DR, inter alia. The present invention thus provides in another aspect, a combination of a therapeutic siRNA compound of the invention together with at least one additional therapeutically active agent. By “in conjunction with” or “in combination with” is meant prior to, simultaneously or subsequent to. Accordingly, the individual components of such a combination can be administered either sequentially or simultaneously from the same or separate pharmaceutical formulations. Further detail on exemplary combination therapies is given below.

[0292] “Respiratory disorder” refers to conditions, diseases or syndromes of the respiratory system including but not limited to pulmonary disorders of all types including chronic obstructive pulmonary disease (COPD), emphysema, chronic bronchitis, asthma and lung cancer, inter alia. Emphysema and chronic bronchitis may occur as part of COPD or independently.

[0293] “Microvascular disorder” refers to any condition that affects microscopic capillaries and lymphatics, in particular vasospastic diseases, vasculitic diseases and lymphatic occlusive diseases. Examples of microvascular disorders include, inter alia: eye disorders such as Amaurosis Fugax (embolic or secondary to SLE), apla syndrome, Prot CS and ATIII deficiency, microvascular pathologies caused by IV drug use, dysproteinemia, temporal arteritis, anterior ischemic optic neuropathy, optic neuritis (primary or secondary to autoimmune diseases), glaucoma, von Hippel Lindau syndrome, corneal disease, corneal transplant rejection cataracts, Eales' disease, frosted branch angiitis, encircling buckling operation, uveitis including pars planitis, choroidal melanoma, choroidal hemangioma, optic nerve aplasia; retinal conditions such as retinal artery occlusion, retinal vein occlusion, retinopathy of prematurity, HIV retinopathy, Purtscher retinopathy, retinopathy of systemic vasculitis and autoimmune diseases, diabetic retinopathy, hypertensive retinopathy, radiation retinopathy, branch retinal artery or vein occlusion, idiopathic retinal vasculitis, aneurysms, neuroretinitis, retinal embolization, acute retinal necrosis, Birdshot retinochoroidopathy, long-standing retinal detachment; systemic conditions such as Diabetes mellitus, diabetic retinopathy (DR), diabetes-related microvascular pathologies (as detailed herein), hyperviscosity syndromes, aortic arch syndromes and ocular ischemic syndromes, carotid-cavernous fistula, multiple sclerosis, systemic lupus erythematosus, arteriolitis with SS-A autoantibody, acute multifocal hemorrhagic vasculitis, vasculitis resulting from infection, vasculitis resulting from Behçet's disease, sarcoidosis, coagulopathies, neuropathies, nephropathies, microvascular diseases of the kidney, and ischemic microvascular conditions, inter alia.

[0294] Microvascular disorders may comprise a neovascular element. The term “neovascular disorder” refers to those conditions where the formation of blood vessels (neovascularization) is harmful to the patient. Examples of ocular neovascularization include: retinal diseases (diabetic retinopathy, diabetic Macular Edema, chronic glaucoma, retinal detachment, and sickle cell retinopathy); rubeosis iritis; proliferative vitreo-retinopathy; inflammatory diseases; chronic uveitis; neoplasms (retinoblastoma, pseudoglioma and melanoma); Fuchs' heterochromic iridocyclitis; neovascular glaucoma; corneal neovascularization (inflammatory, transplantation and developmental hypoplasia of the iris); neovascularization following a combined vitrectomy and lensectomy; vascular diseases (retinal ischemia, choroidal vascular insufficiency, choroidal thrombosis and carotid artery ischemia); neovascularization of the optic nerve; and neovascularization due to penetration of the eye or contusive ocular injury. All these neovascular conditions may be treated using the compounds and pharmaceutical compositions of the present invention.

[0295] “Eye disease” refers to conditions, diseases or syndromes of the eye including but not limited to any conditions involving choroidal neovascularization (CNV), wet and dry AMD, ocular histoplasmosis syndrome, angiod streaks, ruptures in Bruch's membrane, myopic degeneration, ocular tumors, retinal degenerative diseases and retinal vein occlusion (RVO). Some conditions disclosed herein, such as DR, which may be treated according to the methods of the present invention have been regarded as either a microvascular disorder and an eye disease, or both, under the definitions presented herein.

[0296] More specifically, the present invention provides methods and compositions useful in treating a subject suffering from or susceptible to adult respiratory distress syndrome (ARDS); Chronic obstructive pulmonary disease (COPD); acute lung injury (ALI); Emphysema; Diabetic Neuropathy, nephropathy and retinopathy; diabetic macular edema (DME) and other diabetic conditions; Glaucoma; age related macular degeneration (AMD); bone marrow transplantation (BMT) retinopathy; ischemic conditions; ocular ischemic syndrome (OIS); kidney disorders: acute renal failure (ARF), delayed graft function (DGF), transplant rejection; hearing disorders (including hearing loss); spinal cord injuries; oral mucositis; dry eye syndrome and pressure sores; neurological disorders arising from ischemic or hypoxic conditions, such as hypertension, hypertensive cerebral vascular disease, a constriction or obstruction of a blood vessel—as occurs in the case of a thrombus or embolus, angioma, blood dyscrasias, any form of compromised cardiac function including cardiac arrest or failure, systemic hypotension; stroke, epilepsy, neurodegenerative disorders, including, without being limited to Parkinson's disease, Amyotrophic Lateral Sclerosis (ALS, Lou Gehrig's Disease), Alzheimer's disease, Huntington's disease and any other disease-induced dementia (such as HIV-associated dementia for example).

[0297] Additionally, the invention provides a method of down-regulating the expression of a RTP801 gene by at least 50% as compared to a control comprising contacting RTP801 mRNA with one or more of the chemically modified siRNA compounds of the present invention.

[0298] In one embodiment the chemically modified siRNA compound of the present invention down-regulates the mammalian RTP801 gene whereby the down-regulation is selected from the group comprising down-regulation of gene function, down-regulation of polypeptide and down-regulation of mRNA expression.

[0299] The invention provides a method of inhibiting the expression of the RTP801 gene by at least 40%, preferably by 50%, 60% or 70%, more preferably by 75%, 80% or 90% as compared to a control comprising contacting an mRNA transcript of the RTP801 gene with one or more of the siRNA compounds of the invention.

[0300] In one embodiment the chemically modified siRNA compound of the invention inhibits the RTP801 polypeptide, whereby the inhibition is selected from the group comprising inhibition of function (which is examined by, for example, an enzymatic assay or a binding assay with a known interactor of the native gene/polypeptide, inter alia), inhibition of RTP801 protein (which is examined by, for example, Western blotting, ELISA or immuno-precipitation, inter alia) and inhibition of RTP801 mRNA expression (which is examined by, for example, Northern blotting, quantitative RT-PCR, in-situ hybridization or microarray hybridization, inter alia).

[0301] In one embodiment the chemically modified siRNA compound of the invention is down-regulating RTP801 gene or polypeptide, whereby the down-regulation is selected from the group comprising down-regulation of function (which is examined by, for example, an enzymatic assay or a binding assay with a known interactor of the native gene/polypeptide, inter alia), down-regulation of protein (which is examined by, for example, Western blotting, ELISA or immuno-precipitation, inter alia) and down-regulation of RTP801 mRNA expression (which is examined by, for example, Northern blotting, quantitative RT-PCR, in-situ hybridization or microarray hybridization, inter alia).

[0302] In additional embodiments the invention provides a method of treating a subject suffering from or susceptible to any disease or disorder accompanied by an elevated level of a mammalian RTP801 gene, the method comprising administering to the subject a chemically modified siRNA compound or composition of the invention in a therapeutically effective dose thereby treating the subject.

[0303] The present invention relates to the use of compounds which down-regulate the expression of a mammalian RTP801 gene particularly to novel small interfering RNAs (siRNAs), in the treatment of the following diseases or conditions in which inhibition of the expression of the mammalian RTP801 gene is beneficial: ARDS; COPD; ALI; Emphysema; Diabetic Neuropathy, nephropathy and retinopathy; DME and other diabetic conditions; Glaucoma; AMD; BMT retinopathy; ischemic conditions including stroke; OIS; Neurodegenerative disorders such as Parkinson's, Alzheimer's, ALS; kidney disorders: ARF, DGF, transplant rejection; hearing disorders; spinal cord injuries; oral mucositis; dry eye syndrome and pressure sores.

[0304] Methods, novel chemically modified siRNA molecules and pharmaceutical compositions comprising said siRNA compounds which inhibit a mammalian RTP801 gene or polypeptide are discussed herein at length, and any of said siRNA molecules and/or pharmaceutical compositions are beneficially employed in the treatment of a subject suffering from or susceptible to any of said conditions. It is to be explicitly understood that known compounds are excluded from the present invention. Novel methods of treatment using known compounds and compositions fall within the scope of the present invention.

[0305] The method of the invention includes administering a therapeutically effective amount of one or more of the chemically modified siRNA compounds of the invention which down-regulate expression of a RTP801 gene.

[0306] By “exposure to a toxic agent” is meant that the toxic agent is made available to, or comes into contact with, a mammal. A toxic agent can be toxic to the nervous system. Exposure to a toxic agent can occur by direct administration, e.g., by ingestion or administration of a food, medicinal, or therapeutic agent, e.g., a chemotherapeutic agent, by accidental contamination, or by environmental exposure, e.g., aerial or aqueous exposure.

[0307] In other embodiments the chemically modified siRNA compounds and methods of the invention are useful for treating or preventing the incidence or severity of other diseases and conditions in a subject. These diseases and conditions include, but are not limited to stroke and stroke-like situations (e.g. cerebral, renal, cardiac failure), neuronal cell death, brain injuries with or without reperfusion, chronic degenerative diseases e.g. neurodegenerative disease including, Huntington's disease, multiple sclerosis, spinobulbar atrophy, prion disease, and apoptosis resulting from traumatic brain injury (TBI). In an additional embodiment, the compounds and methods of the invention are directed to providing neuroprotection, and or cerebroprotection.

[0308] The present invention also provides for a process of preparing a pharmaceutical composition, which comprises:

providing one or more double stranded chemically modified siRNA compound of the invention; and
admixing said compound with a pharmaceutically acceptable carrier.

[0309] In a preferred embodiment, the siRNA compound used in the preparation of a pharmaceutical composition is admixed with a carrier in a pharmaceutically effective dose. In a particular embodiment the chemically modified siRNA compound of the present invention is conjugated to a steroid or to a lipid or to another suitable molecule e.g. to cholesterol.

### Combination Therapy

[0310] The methods of treating the diseases disclosed herein include administering a novel chemically modified siRNA compound of the invention in conjunction or in combination with an additional RTP801 inhibitor, a substance which improves the pharmacological properties of the chemically modified siRNA compound, or an additional compound known to be effective in the treatment of a subject suffering from or susceptible to any of the hereinabove mentioned diseases and disorders, including microvascular disorder, eye disease and condition (e.g. macular degeneration), hearing impairment (including hearing loss), respiratory disorder, neurodegenerative disorder, spinal cord injury, angiogenesis- and apoptosis-related condition.

[0311] The present invention thus provides in another aspect, a pharmaceutical composition comprising a combination of a therapeutic siRNA compound of the invention together with at least one additional therapeutically active agent. By “in conjunction with” or “in combination with” is meant prior to, simultaneously or subsequent to. Accordingly, the individual components of such a combination are administered either sequentially or simultaneously from the same or separate pharmaceutical formulations.

[0312] Combination therapies comprising known treatments for treating microvascular disorders, eye disease and conditions (e.g. macular degeneration), hearing impairments (including hearing loss), respiratory disorders, neurodegenerative disorders (e.g. spinal cord injury), angiogenesis- and apoptosis-related conditions, in conjunction with the novel chemically modified siRNA compounds and therapies described herein are considered part of the current invention.

[0313] Accordingly, in another aspect of present invention, an additional pharmaceutically effective compound is administered in conjunction with the pharmaceutical composition of the invention. in treatment of conditions where inhibition of RTP801 activity is beneficial. In addition, the siRNA compounds of the invention are used in the preparation of a medicament for use as adjunctive therapy with a second therapeutically active compound to treat such conditions. Appropriate doses of known second therapeutic agents for use in combination with a chemically modified siRNA compound of the invention are readily appreciated by those skilled in the art.

[0314] In some embodiments the combinations referred to above are presented for use in the form of a single pharmaceutical formulation.

[0315] The administration of a pharmaceutical composition comprising any one of the pharmaceutically active siRNA compounds according to the invention is carried out by any of the many known routes of administration, including intravenously, intra-arterially, subcutaneously, intra-peritoneally or intra-cerebrally, as determined by a skilled practitioner. Using specialized formulations, it is possible to administer the compositions orally or via inhalation or via intranasal instillation.

[0316] By “in conjunction with” is meant that the additional pharmaceutically effective compound is administered prior to, at the same time as, or subsequent to administration of the pharmaceutical compositions of present invention. The individual components of such a combination referred to above, therefore, can be administered either sequentially or simultaneously from the same or separate pharmaceutical formulations. As is the case for the present siRNA compounds, a second therapeutic agent can be administered by any suitable route, for example, by oral, buccal, inhalation, sublingual, rectal, vaginal, transurethral, nasal, topical, percutaneous (i.e., transdermal), or parenteral (including intravenous, intramuscular, subcutaneous, and intracoronary) administration.

[0317] In some embodiments, a chemically modified siRNA compound of the invention and the second therapeutic agent are administered by the same route, either provided in a single composition as two or more different pharmaceutical compositions. However, in other embodiments, a different route of administration for the novel siRNA compound of the invention and the second therapeutic agent either is possible. Persons skilled in the art are aware of the best modes of administration for each therapeutic agent, either alone or in combination.

[0318] In various embodiments, the siRNA compounds of the present invention are the main active component in a pharmaceutical composition.

[0319] In another aspects, the present invention provides a pharmaceutical composition comprising two or more siRNA molecules for the treatment of any of the diseases and conditions mentioned herein. In some embodiments the two or more siRNA molecules or formulations comprising said molecules are admixed in the pharmaceutical composition in amounts which generate equal or otherwise beneficial activity. In certain embodiments the two or more siRNA molecules are covalently or non-covalently bound, or joined together by a nucleic acid linker of a length ranging from 2-100, preferably 2-50 or 2-30 nucleotides. In one embodiment, the two or more siRNA molecules target mRNA to RTP801. In some embodiments at least one of the two or more siRNA compounds target RTP801 mRNA. In some embodiments at least one of the siRNA compounds comprises an antisense sequence substantially identical to an antisense sequence set for the in any one of Tables A-I. In some embodiments the siRNA sense and antisense oligonucleotides are selected from sense and corresponding antisense oligonucleotides set forth in any one of Tables A-I, set forth in SEQ ID NOS:3-3624.

[0320] In some embodiments the pharmaceutical compositions of the invention further comprise one or more additional siRNA molecule, which targets one or more additional gene. In some embodiments, simultaneous inhibition of said additional gene(s) provides an additive or synergistic effect for treatment of the diseases disclosed herein.

[0321] The treatment regimen according to the invention is carried out, in terms of administration mode, timing of the administration, and dosage, so that the functional recovery of the patient from the adverse consequences of the conditions disclosed herein is improved.

### Conditions to be Treated

### Microvascular Disorders

[0322] Microvascular disorders include a broad group of conditions that primarily affect the microscopic capillaries and lymphatics and are therefore outside the scope of direct surgical intervention. Microvascular disease can be broadly grouped into the vasospastic, the vasculitis and lymphatic occlusive. Additionally, many of the known vascular conditions have a microvascular element to them.

[0323] Vasospastic Disease

[0324] Vasospastic diseases are a group of relatively common conditions where, for unknown reasons, the peripheral vasoconstrictive reflexes are hypersensitive. This results in inappropriate vasoconstriction and tissue ischemia, even to the point of tissue loss. Vasospastic symptoms are usually related to temperature or the use of vibrating machinery but may be secondary to other conditions.

[0325] Vasculitic Disease

[0326] Vasculitic diseases are those that involve a primary inflammatory process in the microcirculation. Vasculitis is usually a component of an autoimmune or connective tissue disorder and is not generally amenable to surgical treatment but requires immunosuppressive treatment if the symptoms are severe.

[0327] Lymphatic Occlusive Disease

[0328] Chronic swelling of the lower or upper limb (lymphoedema) is the result of peripheral lymphatic occlusion. This is a relatively rare condition that has a large number of causes, some inherited, some acquired. The mainstays of treatment are correctly fitted compression garments and the use of intermittent compression devices.

Microvascular Pathologies Associated with Diabetes

[0329] Diabetes is the leading cause of blindness, the number one cause of amputations and impotence, and one of the most frequently occurring chronic childhood diseases. Diabetes is also the leading cause of end-stage renal disease in the United States, with a prevalence rate of 31% compared with other renal diseases. Diabetes is also the most frequent indication for kidney transplantation, accounting for 22% of all transplantations.

[0330] In general, diabetic complications can be classified broadly as microvascular or macrovascular disease. Microvascular complications include neuropathy (nerve damage), nephropathy (kidney disease) and vision disorders (e.g. retinopathy, glaucoma, cataract and corneal disease). In the retina, glomerulus, and vasa nervorum, similar pathophysiologic features characterize diabetes-specific microvascular disease

[0331] (For further information, see Larsen: Williams Textbook of Endocrinology, 10th ed., 2003 Elsevier).

### Neuropathy

[0332] Neuropathy affects all peripheral nerves: pain fibers, motor neurons, autonomic nerves and therefore necessarily can affect all organs and systems. There are several distinct syndromes based on the organ systems and members affected, but these are by no means exclusive. A patient can have sensorimotor and autonomic neuropathy or any other combination. Despite advances in the understanding of the metabolic causes of neuropathy, treatments aimed at interrupting these pathological processes have been limited by side effects and lack of efficacy. Thus, treatments are symptomatic and do not address the underlying problems. Agents for pain caused by sensorimotor neuropathy include tricyclic antidepressants (TCAs), serotonin reuptake inhibitors (SSRIs) and antiepileptic drugs (AEDs). None of these agents reverse the pathological processes leading to diabetic neuropathy and none alter the relentless course of the illness.

### Diabetic Neuropathy

[0333] Diabetic neuropathies are neuropathic disorders (peripheral nerve damage) that are associated with diabetes mellitus. These conditions usually result from diabetic microvascular injury involving small blood vessels that supply nerves (vasa nervorum). Relatively common conditions which may be associated with diabetic neuropathy include third nerve palsy; mononeuropathy; mononeuropathy multiplex; diabetic amyotrophy; a painful polyneuropathy; autonomic neuropathy; and thoracoabdominal neuropathy and the most common form, peripheral neuropathy, which mainly affects the feet and legs. There are four factors involved in the development of diabetic neuropathy: microvascular disease, advanced glycated end products, protein kinase C, and the polyol pathway.

### Diabetic Limb Ischemia and Diabetic Foot Ulcers

[0334] Diabetes and pressure can impair microvascular circulation and lead to changes in the skin on the lower extremities, which in turn, can lead to formation of ulcers and subsequent infection. Microvascular changes lead to limb muscle microangiopathy, as well as a predisposition to develop peripheral ischemia and a reduced angiogenesis compensatory response to ischemic events. Microvascular pathology exacerbates Peripheral Vascular Disease (PVD) (or Peripheral Arterial Disease (PAD) or Lower Extremity Arterial Disease (LEAD)—a MACROvascular complication—narrowing of the arteries in the legs due to atherosclerosis. PVD occurs earlier in diabetics, is more severe and widespread, and often involves intercurrent microcirculatory problems affecting the legs, eyes, and kidneys.

[0335] Foot ulcers and gangrene are frequent comorbid conditions of PAD. Concurrent peripheral neuropathy with impaired sensation renders the foot susceptible to trauma, ulceration, and infection. The progression of PAD in diabetes is compounded by such comorbidity as peripheral neuropathy and insensitivity of the feet and lower extremities to pain and trauma. With impaired circulation and impaired sensation, ulceration and infection occur. Progression to osteomyelitis and gangrene may necessitate amputation. Persons with diabetes are up to 25 times more likely than non-diabetic persons to sustain a lower limb amputation, underscoring the need to prevent foot ulcers and subsequent limb loss (For further information, see Am. J. Surgery, 187; 5 Suppl 1, May 1, 2004).

### Coronary Microvascular Dysfunction in Diabetes

[0336] The correlation between histopathology and microcirculatory dysfunction in diabetes is well known from old experimental studies and from autopsy, where thickening of the basal membrane, perivascular fibrosis, vascular rarefication, and capillary hemorrhage are frequently found. It remains difficult to confirm these data in vivo, although a recent paper demonstrated a correlation between pathology and ocular microvascular dysfunction (Am J Physiol 2003; 285). A large amount of clinical studies, however, indicate that not only overt diabetes but also impaired metabolic control may affect coronary microcirculation (Hypert Res 2002; 25:893). Sambuceti et al (Circulation 2001; 104:1129) showed the persistence of microvascular dysfunction in patients after successful reopening of the infarct related artery, and which may explain the increased cardiovascular morbidity and mortality in these patients. There is mounting evidence from large acute reperfusion studies that morbidity and mortality are unrelated to the reopening itself of the infarct related artery, but much more dependent on the TIMI flow+/−myocardial blush (Stone 2002; Feldmann Circulation 2003). Herrmann indicated, among others, that the integrity of the coronary microcirculation is probably the most important clinical and prognostic factor in this context (Circulation 2001). The neutral effect of protection devices (no relevant change for TIMI flow, for ST resolution, or for MACE) may indicate that a functional impairment of microcirculation is the major determinant of prognosis. There is also increasing evidence that coronary microvascular dysfunction plays a major role in non-obstructive coronary artery disease (CAD). Coronary endothelial dysfunction remains a strong prognostic predictor in these patients.

Diabetic Nephropathy (Renal Dysfunction in Patients with Diabetes)

[0337] Diabetic nephropathy encompasses microalbuminuria (a microvascular disease effect), proteinuria and end stage renal disease (ESRD). Diabetes is the most common cause of kidney failure, accounting for more than 40 percent of new cases. Even when drugs and diet are able to control diabetes, the disease can lead to nephropathy and kidney failure. Most people with diabetes do not develop nephropathy that is severe enough to cause kidney failure. About 16 million people in the United States have diabetes, and about 100,000 people have kidney failure as a result of diabetes.

### Diabetic Retinopathy

[0338] According to the World Health Organization, diabetic retinopathy is the leading cause of blindness in working age adults and a leading cause of vision loss in diabetics. The American Diabetes Association reports that there are approximately 18 million diabetics in the United States and approximately 1.3 million newly diagnosed cases of diabetes in the United States each year. Prevent Blindness America and the National Eye Institute estimate that in the United States there are over 5.3 million people aged 18 or older with diabetic retinopathy.

[0339] Diabetic retinopathy is defined as the progressive dysfunction of the retinal vasculature caused by chronic hyperglycemia. Key features of diabetic retinopathy include microaneurysms, retinal hemorrhages, retinal lipid exudates, cotton-wool spots, capillary nonperfusion, macular edema and neovascularization. Associated features include vitreous hemorrhage, retinal detachment, neovascular glaucoma, premature cataract and cranial nerve palsies.

[0340] Specifically, apoptosis has been localized to glial cells such as Mueller cells and astrocytes and has been shown to occur within 1 month of diabetes in the STZ-induced diabetic rat model. The cause of these events is multi-factorial including activation of the diacylglycerol/PKC pathway, oxidative stress, and non-enzymatic glycosylation. The combination of these events renders the retina hypoxic and ultimately leads to the development of diabetic retinopathy. One possible connection between retinal ischemia and the early changes in the diabetic retina is the hypoxia-induced production of growth factors such as VEGF. The master regulator of the hypoxic response has been identified as hypoxia inducible factor-1 (HIF-1), which controls genes that regulate cellular proliferation and angiogenesis. RTP801 is responsive to hypoxia-responsive transcription factor hypoxia-inducible factor 1 (HIF-1) and is typically up-regulated during hypoxia both in vitro and in vivo in an animal model of ischemic stroke.

### Diabetic Macular Edema (DME)

[0341] Prevent Blindness America and the National Eye Institute estimate that in the United States there are over 5.3 million people aged 18 or older with diabetic retinopathy, including approximately 500,000 with DME. The CDC estimates that there are approximately 75,000 new cases of DME in the United States each year.

[0342] DME is a complication of diabetic retinopathy, a disease affecting the blood vessels of the retina. Diabetic retinopathy results in multiple abnormalities in the retina, including retinal thickening and edema, hemorrhages, impeded blood flow, excessive leakage of fluid from blood vessels and, in the final stages, abnormal blood vessel growth. This blood vessel growth can lead to large hemorrhages and severe retinal damage. When the blood vessel leakage of diabetic retinopathy causes swelling in the macula, it is referred to as DME. The principal symptom of DME is a loss of central vision. Risk factors associated with DME include poorly controlled blood glucose levels, high blood pressure, abnormal kidney function causing fluid retention, high cholesterol levels and other general systemic factors.

### Microvascular Diseases of the Kidney

[0343] The kidney is involved in a number of discreet clinicopathologic conditions that affect systemic and renal microvasculature. Certain of these conditions are characterized by primary injury to endothelial cells, such as: hemolytic-uremic syndrome (HUS) and thrombotic thrombocytopenic purpura (TTP). HUS and TTP are closely related diseases characterized by microangiopathic hemolytic anemia and variable organ impairment. Traditionally, the diagnosis of HUS is made when renal failure is a predominant feature of the syndrome, as is common in children. In adults, neurological impairment frequently predominates and the syndrome is then referred to as TTP. Thrombotic microangiopathy is the underlying pathologic lesion in both syndromes, and the clinical and laboratory findings in patients with either HUS or TTP overlap to a large extent. This has prompted several investigators to regard the two syndromes as a continuum of a single disease entity.

[0344] Pathogenesis: Experimental data strongly suggest that endothelial cell injury is the primary event in the pathogenesis of HUS/TTP. Endothelial damage triggers a cascade of events that includes local intravascular coagulation, fibrin deposition, and platelet activation and aggregation. The end result is the histopathological finding of thrombotic microangiopathy common to the different forms of the HUS/TTP syndrome. If HUS/TTP is left untreated, the mortality rate approaches 90%. Supportive therapy—including dialysis, antihypertensive medications, blood transfusions, and management of neurological complications—contributes to the improved survival of patients with HUS/TTP. Adequate fluid balance and bowel rest are important in treating typical HUS associated with diarrhea.

### Radiation Nephritis

[0345] The long-term consequences of renal irradiation in excess of 2500 rad can be divided into five clinical syndromes:

(i) Acute radiation nephritis occurs in approximately 40% of patients after a latency period of 6 to 13 months. It is characterized clinically by abrupt onset of hypertension, proteinuria, edema, and progressive renal failure in most cases leading to end-stage kidneys.
(ii) Chronic radiation nephritis, conversely, has a latency period that varies between 18 months and 14 years after the initial insult. It is insidious in onset and is characterized by hypertension, proteinuria, and gradual toss of renal function.
(iii) The third syndrome manifests 5 to 19 years after exposure to radiation as benign proteinuria with normal renal function.
(iv) A fourth group of patients exhibits only benign hypertension 2 to 5 years later and may have variable proteinuria. Late malignant hypertension arises 18 months to 11 years after irradiation in patients with either chronic radiation nephritis or benign hypertension. Removal of the affected kidney reversed the hypertension. Radiation-induced damage to the renal arteries with subsequent Reno vascular hypertension has been reported.
(v) A syndrome of renal insufficiency analogous to acute radiation nephritis has been observed in bone marrow transplantation (BMT) patients who were treated with total-body irradiation (TBI).

[0346] Irradiation causes endothelial dysfunction but spares vascular smooth muscle cells in the early postradiation phase. Radiation could directly damage DNA, leading to decreased regeneration of these cells and denudement of the basement membrane in the glomerular capillaries and tubules. In other kidney diseases, the microvasculature of the kidney is involved in autoimmune disorders, such as systemic sclerosis (scleroderma). Kidney involvement in systemic sclerosis manifests as a slowly progressing chronic renal disease or as scleroderma renal crisis (SRC), which is characterized by malignant hypertension and acute azotemia. It is postulated that SRC is caused by a Raynaud-like phenomenon in the kidney. Severe vasospasm leads to cortical ischemia and enhanced production of renin and angiotensin II, which in turn perpetuate renal vasoconstriction. Hormonal changes (pregnancy), physical and emotional stress, or cold temperature may trigger the Raynaud-like arterial vasospasm.

[0347] The renal microcirculation can also be affected in sickle cell disease, to which the kidney is particularly susceptible because of the low oxygen tension attained in the deep vessels of the renal medulla as a result of countercurrent transfer of oxygen along the vasa recta. The smaller renal arteries and arterioles can also be the site of thromboembolic injury from cholesterol-containing material dislodged from the walls of the large vessels.

### Retinal Microvasculopathy (AIDS Retinopathy)

[0348] Retinal microvasculopathy is seen in 100% of AIDS patients and is characterized by intraretinal hemorrhages, microaneurysms, Roth spots, cotton-wool spots (microinfarctions of the nerve fiber layer) and perivascular sheathing. The etiology of the retinopathy is unknown though it has been thought to be due to circulating immune complexes, local release of cytotoxic substances, abnormal hemorheology, and HIV infection of endothelial cells. AIDS retinopathy is now so common that cotton wool spots in a patient without diabetes or hypertension but at risk for HIV should prompt the physician to consider viral testing. There is no specific treatment for AIDS retinopathy but its continued presence may prompt a physician to reexamine the efficacy of the HIV therapy and patient compliance.

### Bone Marrow Transplantation BMT Retinopathy

[0349] Bone marrow transplantation retinopathy was first reported in 1983. It typically occurs within six months, but it can occur as late as 62 months after BMT. Risk factors such as diabetes and hypertension may facilitate the development of BMT retinopathy by heightening the ischemic microvasculopathy. There is no known age, gender or race predilection for development of BMT retinopathy. Patients present with decreased visual acuity and/or visual field deficit. Posterior segment findings are typically bilateral and symmetric. Clinical manifestations include multiple cotton wool spots, telangiectasia, microaneurysms, macular edema, hard exudates and retinal hemorrhages. Fluorescein angiography demonstrates capillary nonperfusion and dropout, intraretinal microvascular abnormalities, microaneurysms and macular edema. Although the precise etiology of BMT retinopathy has not been elucidated, it appears to be affected by several factors: cyclosporine toxicity, total body irradiation (TBI), and chemotherapeutic agents. Cyclosporine is a powerful immunomodulatory agent that suppresses graft-versus-host immune response. It may lead to endothelial cell injury and neurological side effects, and as a result, it has been suggested as the cause of BMT retinopathy. However, BMT retinopathy can develop in the absence of cyclosporine use, and cyclosporine has not been shown to cause BMT retinopathy in autologous or syngeneic bone marrow recipients. Cyclosporine does not, therefore, appear to be the sole cause of BMT retinopathy. Total body irradiation (TBI) has also been implicated as the cause of BMT retinopathy. Radiation injures the retinal microvasculature and leads to ischemic vasculopathy.

### Other Eye Disorders

### Glaucoma

[0350] Glaucoma is one of the leading causes of blindness in the world. It affects approximately 66.8 million people worldwide. At least 12,000 Americans are blinded by this disease each year (Kahn and Milton, Am J. Epidemiol. 1980, 111(6):769-76). Glaucoma is characterized by the degeneration of axons in the optic nerve head, primarily due to elevated intraocular pressure (TOP). One of the most common forms of glaucoma, known as primary open-angle glaucoma (POAG), results from the increased resistance of aqueous humor outflow in the trabecular meshwork (TM), causing IOP elevation and eventual optic nerve damage. Other main types of glaucoma are angle closure glaucoma, normal tension glaucoma and pediatric glaucoma. These are also marked by an increase of intraocular pressure (TOP), or pressure inside the eye. When optic nerve damage has occurred despite a normal IOP, this is called normal tension glaucoma. Secondary glaucoma refers to any case in which another disease causes or contributes to increased eye pressure, resulting in optic nerve damage and vision loss. Mucke (Drugs 2007, 10(1):37-41) reviews current therapeutics, including siRNA to various targets for the treatment of ocular diseases, for example, age-related macular degeneration (AMD) and glaucoma.

### Macular Degeneration

[0351] The most common cause of decreased best-corrected vision in individuals over 65 years of age in the US is the retinal disorder known as age-related macular degeneration (AMD). As AMD progresses, the disease is characterized by loss of sharp, central vision. The area of the eye affected by AMD is the Macula—a small area in the center of the retina, composed primarily of photoreceptor cells. So-called “dry” AMD, accounting for about 85%-90% of AMD patients, involves alterations in eye pigment distribution, loss of photoreceptors and diminished retinal function due to overall atrophy of cells. So-called “wet” AMD involves proliferation of abnormal choroidal vessels leading to clots or scars in the sub-retinal space. Thus, the onset of wet AMD occurs because of the formation of an abnormal choroidal neovascular network (choroidal neovascularization, CNV) beneath the neural retina. The newly formed blood vessels are excessively leaky. This leads to accumulation of subretinal fluid and blood leading to loss of visual acuity. Eventually, there is total loss of functional retina in the involved region, as a large disciform scar involving choroids and retina forms. While dry AMD patients may retain vision of decreased quality, wet AMD often results in blindness. (Hamdi & Kenney, Frontiers in Bioscience, e305-314, May 2003). CNV occurs not only in wet AMD but also in other ocular pathologies such as ocular histoplasmosis syndrome, angiod streaks, ruptures in Bruch's membrane, myopic degeneration, ocular tumors and some retinal degenerative diseases.

### Ocular Ischemic Syndrome

[0352] Patients suffering from ocular ischemic syndrome (OIS) are generally elderly, ranging in age from the 50s to 80s. Males are affected twice as commonly as females. The patient is only rarely asymptomatic. Decreased vision occurs at presentation in 90 percent of cases, and 40 percent of patients have attendant eye pain. There may also be an attendant or antecedent history of transient ischemic attacks or amaurosis fugax. Patients also have significant known or unknown systemic disease at the time of presentation. The most commonly encountered systemic diseases are hypertension, diabetes, ischemic heart disease, stroke, and peripheral vascular disease. To a lesser extent, patients manifest OIS as a result of giant cell arteritis (GCA).

[0353] Unilateral findings are present in 80 percent of cases. Common findings may include advanced unilateral cataract, anterior segment inflammation, asymptomatic anterior chamber reaction, macular edema, dilated but non-tortuous retinal veins, mid-peripheral dot and blot hemorrhages, cotton wool spots, exudates, and neovascularization of the disc and retina. There may also be spontaneous arterial pulsation, elevated intraocular pressure, and neovascularization of the iris and angle with neovascular glaucoma (NVG). While the patient may exhibit anterior segment neovascularization, ocular hypotony may occur due to low arterial perfusion to the ciliary body. Occasionally, there are visible retinal emboli (Hollenhorst plaques).

### Dry-Eye Syndrome

[0354] Dry eye syndrome is a common problem usually resulting from a decrease in the production of tear film that lubricates the eyes. Most patients with dry eye experience discomfort, and no vision loss; although in severe cases, the cornea may become damaged or infected. Wetting drops (artificial tears) may be used for treatment while lubricating ointments may help more severe cases.

### Additional Eye Disorders

[0355] Additional disorders which can be treated by the molecules and compositions of the present invention include all types of choroidal neovascularization (CNV), which occurs not only in wet AMD but also in other ocular pathologies such as ocular histoplasmosis syndrome, angiod streaks, ruptures in Bruch's membrane, myopic degeneration, ocular tumors and some retinal degenerative diseases.

### Otic Disorders

### Hearing Loss

[0356] In various embodiments, the novel chemically modified siRNA compounds of the invention are applied to various conditions of hearing loss. Without being bound by theory, the hearing loss may be due to apoptotic inner ear hair cell damage or loss (Zhang et al., Neuroscience 2003. 120:191-205; Wang et al., J. Neuroscience 23 ((24): 8596-8607), wherein the damage or loss is caused by infection, mechanical injury, loud sound (noise), aging (presbycusis), or chemical-induced ototoxicity.

[0357] By “ototoxin” in the context of the present invention is meant a substance that through its chemical action injures, impairs or inhibits the activity of the sound receptors component of the nervous system related to hearing, which in turn impairs hearing (and/or balance). In the context of the present invention, ototoxicity includes a deleterious effect on the inner ear hair cells. Ototoxins include therapeutic drugs including antineoplastic agents, salicylates, loop-diuretics; quinines, and aminoglycoside antibiotics, contaminants in foods or medicinals, and environmental or industrial pollutants. Typically, treatment is performed to prevent or reduce ototoxicity, especially resulting from or expected to result from administration of therapeutic drugs. Preferably a therapeutically effective composition comprising the novel chemically modified siRNA compound of the invention is given immediately after the exposure to prevent or reduce the ototoxic effect. More preferably, treatment is provided prophylactically, either by administration of the pharmaceutical composition of the invention prior to or concomitantly with the ototoxic pharmaceutical or the exposure to the ototoxin.

[0358] Incorporated herein by reference are chapters 196, 197, 198 and 199 of The Merck Manual of Diagnosis and Therapy, 14th Edition, (1982), Merck Sharp & Dome Research Laboratories, N.J. and corresponding chapters in the most recent 16th edition, including Chapters 207 and 210) relating to description and diagnosis of hearing and balance impairments.

[0359] Accordingly, in one aspect the present invention provides a method, novel chemically modified siRNA compounds and pharmaceutical compositions for treating a mammal, preferably human, to prevent, reduce, or treat a hearing impairment, disorder or imbalance, preferably an ototoxin-induced hearing condition, by administering to a mammal in need of such treatment a chemically modified siRNA compound of the invention. One embodiment of the invention is a method for treating a hearing disorder or impairment wherein the ototoxicity results from administration of a therapeutically effective amount of an ototoxic pharmaceutical drug. Typical ototoxic drugs are chemotherapeutic agents, e.g. antineoplastic agents, and antibiotics. Other possible candidates include loop-diuretics, quinines or a quinine-like compound, and salicylate or salicylate-like compounds.

[0360] Ototoxicity is a dose-limiting side effect of antibiotic administration. From 4 to 15% of patients receiving 1 gram per day for greater than 1 week develop measurable hearing loss, which slowly becomes worse and can lead to complete permanent deafness if treatment continues. Ototoxic aminoglycoside antibiotics include but are not limited to neomycin, paromomycin, ribostamycin, lividomycin, kanamycin, amikacin, tobramycin, viomycin, gentamicin, sisomicin, netilmicin, streptomycin, dibekacin, fortimicin, and dihydrostreptomycin, or combinations thereof. Particular antibiotics include neomycin B, kanamycin A, kanamycin B, gentamicin C1, gentamicin C1a, and gentamicin C2, and the like that are known to have serious toxicity, particularly ototoxicity and nephrotoxicity, which reduce the usefulness of such antimicrobial agents (see Goodman and Gilman's The Pharmacological Basis of Therapeutics, 6th ed., A. Goodman Gilman et al., eds; Macmillan Publishing Co., Inc., New York, pp. 1169-71 (1980)).

[0361] Ototoxicity is also a serious dose-limiting side-effect for anti-cancer agents. Ototoxic neoplastic agents include but are not limited to vincristine, vinblastine, cisplatin and cisplatin-like compounds and taxol and taxol-like compounds. Cisplatin-like compounds include carboplatin (Paraplatin®), tetraplatin, oxaliplatin, aroplatin and transplatin inter alia and are platinum based chemotherapeutics.

[0362] Diuretics with known ototoxic side-effect, particularly “loop” diuretics include, without being limited to, furosemide, ethacrylic acid, and mercurials.

[0363] Ototoxic quinines include but are not limited to synthetic substitutes of quinine that are typically used in the treatment of malaria.

[0364] Salicylates, such as aspirin, are the most commonly used therapeutic drugs for their anti-inflammatory, analgesic, anti-pyretic and anti-thrombotic effects. Unfortunately, they too have ototoxic side effects. They often lead to tinnitus (“ringing in the ears”) and temporary hearing loss. Moreover, if the drug is used at high doses for a prolonged time, the hearing impairment can become persistent and irreversible.

[0365] In some embodiments a siRNA compound of the invention is co-administered with an ototoxin. For example, an improved method is provided for treatment of infection of a mammal by administration of an aminoglycoside antibiotic, the improvement comprising administering a therapeutically effective amount of one or more chemically modified siRNAs compounds of the invention which down-regulate expression of RTP801, to the subject in need of such treatment to reduce or prevent ototoxin-induced hearing impairment associated with the antibiotic. The chemically modified siRNA compounds of the invention are preferably administered locally within the inner ear.

[0366] The methods, chemically modified siRNA compounds and pharmaceutical and compositions of the present invention are also effective in the treatment of acoustic trauma or mechanical trauma, preferably acoustic or mechanical trauma that leads to inner ear hair cell loss. With more severe exposure, injury can proceed from a loss of adjacent supporting cells to complete disruption of the organ of Corti. Death of the sensory cell can lead to progressive Wallerian degeneration and loss of primary auditory nerve fibers. The siRNA compounds of the invention are useful in treating acoustic trauma caused by a single exposure to an extremely loud sound, or following long-term exposure to everyday loud sounds above 85 decibels. The siRNA compounds of the present invention are useful in treating mechanical inner ear trauma, for example, resulting from the insertion of an electronic device into the inner ear. The siRNA compounds of the present invention prevent or minimize the damage to inner ear hair cells associated with the operation.

[0367] Another type of hearing loss is presbycusis, which is hearing loss that gradually occurs in most individuals as they age. About 30-35 percent of adults between the ages of 65 and 75 years and 40-50 percent of people 75 and older experience hearing loss. The siRNA compounds of the present invention prevent, reduce or treat the incidence and/or severity of inner ear disorders and hearing impairments associated with presbycusis.

### Lund Diseases and Disorders

### Lung Injury and Respiratory Disorders

[0368] In various embodiments the chemically modified siRNA compounds of the invention are useful for treating or preventing the incidence or severity of acute lung injury, in particular conditions which result from ischemic/reperfusion injury or oxidative stress and for treating chronic obstructive pulmonary disease (COPD).

[0369] Non-limiting examples of acute lung injuries include acute respiratory distress syndrome (ARDS) due to coronavirus infection or endotoxins, severe acute respiratory syndrome (SARS) and ischemia reperfusion injury associated with lung transplantation.

### Chronic Obstructive Pulmonary Disease (COPD)

[0370] Chronic obstructive pulmonary disease (COPD), affects more than 16 million Americans and is the fourth highest cause of death in the United States. Cigarette smoking causes most occurrences of the debilitating disease but other environmental factors cannot be excluded (Petty T L. 2003. Clin. Cornerstone, 5-10).

[0371] Pulmonary emphysema is a major manifestation of COPD. Permanent destruction of peripheral air spaces, distal to terminal bronchioles, is the hallmark of emphysema (Tuder, et al. Am J Respir Cell Mol Biol, 29:88-97; 2003). Emphysema is also characterized by accumulation of inflammatory cells such as macrophages and neutrophils in bronchioles and alveolar structures (Petty, 2003).

[0372] The pathogenesis of emphysema is complex and multifactorial. In humans, a deficiency of inhibitors of proteases produced by inflammatory cells, such as alpha 1-antitrypsin, has been shown to contribute to protease/antiprotease imbalance, thereby favoring destruction of alveolar extracellular matrix in cigarette-smoke (CS) induced emphysema (Eriksson, S. 1964. Acta Med Scand 175:197-205. Joos, L., Pare, P. D., and Sandford, A. J. 2002. Swiss Med Wkly 132:27-37). Matrix metalloproteinases (MMPs) play a central role in experimental emphysema, as documented by resistance of macrophage metalloelastase knockout mice against emphysema caused by chronic inhalation of CS (Hautamaki, et al: Requirement for macrophage elastase for cigarette smoke-induced emphysema in mice. Science 277:2002-2004). Moreover, pulmonary overexpression of interleukin-13 in transgenic mice results in MMP- and cathepsin-dependent emphysema (Zheng, T., et al 2000. J Clin Invest 106:1081-1093). Oxidative stress and apoptosis interact and cause emphysema due to vascular endothelial growth factor blockade (Tuder et al. Am J Respir Cell Mol Biol, 29:88-97; 2003; Yokohori N, et al. Chest. 2004 February; 125(2):626-32; Aoshiba K, et al. Am J Respir Cell Mol. Biol. 2003 May; 28(5):555-62). Both reactive oxygen species (ROS) from inhaled cigarette smoke and those endogenously formed by inflammatory cells contribute to an increased intrapulmonary oxidant burden.

[0373] An additional pathogenic factor with regards to COPD pathogenesis is the observed decreased expression of VEGF and VEGFR11 in lungs of emphysematous patients (Yasunori Kasahara, et al. Am J Respir Crit. Care Med. Vol 163. pp 737-744, 2001). Moreover, inhibition of VEGF signaling using chemical VEGFR inhibitor leads to alveolar septal endothelial and then to epithelial cell apoptosis, probably due to disruption of intimate structural/functional connection of both types of cells within alveoli (Yasunori Kasahara et al. J. Clin. Invest. 106:1311-1319 (2000); Voelkel N F, Cool C D, Eur Respir J Suppl. 2003. 46:28s-32s).

[0374] In various embodiments pharmaceutical composition for treatment of respiratory disorders may be comprised of the following compound combinations: chemically modified RTP801 siRNA compound of the invention combined with a siRNA compound that targets one or more of the following genes: elastases, matrix metalloproteases, phospholipases, caspases, sphingomyelinase, and ceramide synthase.

### Acute Respiratory Distress Syndrome

[0375] Acute respiratory distress syndrome (ARDS), also known as respiratory distress syndrome (RDS) or adult respiratory distress syndrome (in contrast with infant respiratory distress syndrome, IRDS) is a serious reaction to various forms of injuries to the lung. This is the most important disorder resulting in increased permeability pulmonary edema.

[0376] ARDS is a severe lung disease caused by a variety of direct and indirect insults. It is characterized by inflammation of the lung parenchyma leading to impaired gas exchange with concomitant systemic release of inflammatory mediators which cause inflammation, hypoxemia and frequently result in failure of multiple organs. This condition is life threatening and often lethal, usually requiring mechanical ventilation and admission to an intensive care unit. A less severe form is called acute lung injury (ALI).

### Lung Cancer

[0377] Lung cancer usually develops in the cells lining the lung's air passages. It is the most lethal of all cancers worldwide, responsible for up to 3 million deaths annually. The two main types are small cell lung cancer (SCLC) and non-small cell lung cancer (NSCLC). These types are diagnosed based on the morphology of the cells. In non-small cell lung cancer, results of standard treatment are poor except for the most localized cancers. Surgery is the most potentially curative therapeutic option for this disease; radiation therapy can produce a cure in only a small number of patients and can provide palliation in most patients. Adjuvant chemotherapy may provide an additional benefit to patients with resected NSCLC. In advanced-stage disease, chemotherapy offers modest improvements in median survival, though overall survival is poor. Chemotherapy has produced short-term improvement in disease-related symptoms. Other forms of cancer in the lung are secondary tumors resulting from metastases of a primary cancer. The siRNA compounds of the present invention are useful in the treatment of lung cancer including metastases in lung tissue.

### Kidney Diseases and Disorders

[0378] The chemically modified siRNA compounds of the invention are are useful in treating or preventing various diseases and disorders that affect the kidney as disclosed herein below.

### Acute Renal Failure (ARF)

[0379] In various embodiments, the chemically modified siRNA compounds of the invention are used for treating kidney disorders, in particular acute renal failure (ARF) due to ischemia in post surgical patients, in kidney transplant patients, and acute renal failure due to chemotherapy treatment such as cisplatin administration or sepsis-associated acute renal failure.

[0380] ARF can be caused by microvascular or macrovascular disease (major renal artery occlusion or severe abdominal aortic disease). The classic microvascular diseases often present with microangiopathic hemolysis and acute renal failure occurring because of glomerular capillary thrombosis or occlusion, often with accompanying thrombocytopenia. Typical examples of these diseases include:

a) Thrombotic thrombocytopenic purpura—The classic pentad in thrombotic thrombocytopenic purpura includes fever, neurological changes, renal failure, microangiopathic hemolytic anemia and thrombocytopenia.
b) Hemolytic uremic syndrome—Hemolytic uremic syndrome is similar to thrombotic thrombocytopenic purpura but does not present with neurological changes.
c) HELLP syndrome (hemolysis, elevated liver enzymes and low platelets). HELLP syndrome is a type of hemolytic uremic syndrome that occurs in pregnant women with the addition of transaminase elevations.

[0381] Acute renal failure can present in all medical settings but is predominantly acquired in hospitals. The condition develops in 5 percent of hospitalized patients, and approximately 0.5 percent of hospitalized patients require dialysis. Over the past 40 years, the survival rate for acute renal failure has not improved, primarily because affected patients are now older and have more comorbid conditions. Infection accounts for 75 percent of deaths in patients with acute renal failure, and cardio-respiratory complications are the second most common cause of death. Depending on the severity of renal failure, the mortality rate can range from 7 percent to as high as 80 percent. Acute renal failure can be divided into three categories: Prerenal, intrinsic and postrenal ARF. Intrinsic ARF is subdivided into four categories: tubular disease, glomerular disease, vascular disease (includes microvascular) and interstitial disease.

[0382] A preferred use of the chemically modified siRNA compounds of the invention is for the prevention of acute renal failure in high-risk patients undergoing major cardiac surgery or vascular surgery. The patients at high-risk of developing acute renal failure can be identified using various scoring methods such as the Cleveland Clinic algorithm or that developed by US Academic Hospitals (QMMI) and by Veterans' Administration (CICSS).

[0383] In another preferred embodiment, the chemically modified siRNA compounds of the invention are used for treating or preventing the damage caused by nephrotoxins such as diuretics, β-blockers, vasodilator agents, ACE inhibitors, cyclosporin, aminoglycoside antibiotics (e.g. gentamicin), amphotericin B, cisplatin, radiocontrast media, immunoglobulins, mannitol, NSAIDs (e.g. aspirin, ibuprofen, diclofenac), cyclophosphamide, methotrexate, acyclovir, polyethylene glycol, β-lactam antibiotics, vancomycin, rifampicin, sulphonamides, ciprofloxacin, ranitidine, cimetidine, furosemide, thiazides, phenyloin, penicillamine, lithium salts, fluoride, demeclocycline, foscarnet, aristolochic acid.

[0384] In a further embodiment of the invention the pharmaceutical composition for treatment of ARF comprises an agent selected from the following combinations of therapeutic agents:
[0385] 1) RTP801 siRNA of the invention and p53 siRNA dimers;
[0386] 2) RTP801 siRNA of the invention and Fas siRNA dimers;
[0387] 3) RTP801 siRNA of the invention and Bax siRNA dimers;
[0388] 4) RTP801 siRNA of the invention and p53 siRNA and Fas siRNA trimers;
[0389] 5) RTP801 siRNA of the invention and Bax siRNA dimers;
[0390] 6) RTP801 siRNA of the invention and Noxa siRNA dimers;
[0391] 7) RTP801 siRNA of the invention and Puma siRNA dimers;
[0392] 8) RTP801 siRNA of the invention (REDD1) and RTP801L (REDD2) siRNA dimmers; and
[0393] 9) RTP801 siRNA of the invention, Fas siRNA and any of RTP801L siRNA, p53 siRNA, Bax siRNA, Noxa siRNA or Puma siRNA to form trimers or polymers (i.e., tandem molecules which encode three siRNAs).

### Progressive Renal Disease

[0394] There is evidence that progressive renal disease is characterized by a progressive loss of the microvasculature. The loss of the microvasculature correlates directly with the development of glomerular and tubulointerstitial scarring. The mechanism is mediated in part by a reduction in the endothelial proliferative response, and this impairment in capillary repair is mediated by alteration in the local expression of both angiogenic (vascular endothelial growth factor) and anti-angiogenic (thrombospondin 1) factors in the kidney. The alteration in balance of angiogenic growth factors is mediated by both macrophage-associated cytokines (interleukin-1β) and vasoactive mediators. Finally, there is intriguing evidence that stimulation of angiogenesis and/or capillary repair may stabilize renal function and slow progression and that this benefit occurs independently of effects on BP or proteinuria (For further information see Brenner & Rector's The Kidney, 7th ed., 2004, Elsevier: Ch 33. Microvascular diseases of the kidney; and Tiwari and Vikrant, Journal of Indian Academy of Clinical Medicine 2000. 5(1):44-54).

### CNS Disease and Disorders

[0395] The chemically modified siRNA compounds of the invention are are useful in treating or preventing various diseases and disorders that affect the central nervous sytem (CNS), as disclosed herein below.

### Spinal Cord Injury

[0396] Spinal cord injury or myelopathy, is a disturbance of the spinal cord that results in loss of sensation and/or mobility. The two most common types of spinal cord injury are due to trauma and disease. Traumatic injuries are often due to automobile accidents, falls, gunshots diving accidents, and the like. Diseases that can affect the spinal cord include polio, spina bifida, tumors, and Friedreich's ataxia.

[0397] In various embodiments, the chemically modified siRNA compounds of the invention are used for treating or preventing the damage caused by spinal-cord injury especially spinal cord trauma caused by motor vehicle accidents, falls, sports injuries, industrial accidents, gunshot wounds, spinal cord trauma caused by spine weakening (such as from rheumatoid arthritis or osteoporosis) or if the spinal canal protecting the spinal cord has become too narrow (spinal stenosis) due to the normal aging process, direct damage that occur when the spinal cord is pulled, pressed sideways, or compressed, damage to the spinal-cord following bleeding, fluid accumulation, and swelling inside the spinal cord or outside the spinal cord (but within the spinal canal). The chemically modified siRNA compounds of the invention are also used for treating or preventing the damage caused by spinal-cord injury due to disease such as polio or spina bifida.

### Post Stroke Dementia

[0398] About 25% of people have dementia after a stroke with many others developing dementia over the following 5 to 10 years. In addition, many individuals experience more subtle impairments of their higher brain functions (such as planning skills and speed of processing information) and are at very high risk of subsequently developing dementia. Very small strokes in the deep parts of the brain in this process (called microvascular disease) seem to be essential in the process leading to an identified pattern of brain atrophy specific to post-stroke dementia.

### Neurodegenerative Disease

[0399] Neurodegenerative diseases are conditions in which cells of the CNS (brain and/or spinal cord) are lost. The CNS cells are not readily regenerated en masse, so excessive damage can be devastating. Neurodegenerative diseases result from deterioration of neurons or their myelin sheath, which over time leads to dysfunction and disabilities. They are crudely divided into two groups according to phenotypic effects, although these are not mutually exclusive: conditions affecting movement, such as ataxia; and conditions affecting memory and related to dementia. Non-limiting examples of neurodegenerative disease are Alzheimer's disease, Amyotrophic lateral sclerosis (ALS, also known as Lou Gehrig's Disease), Huntington's disease, Lewy body dementia and Parkinson's disease.

[0400] Another type of neurodegenerative diseases includes diseases caused by misfolded proteins, or prions. Non-limiting examples of prion diseases in humans are Creutzfeldt-Jakob disease (CJD) and variant CJD (Mad Cow Disease).

### Ischemia of the Brain

[0401] Brain injury such as trauma and stroke are among the leading causes of mortality and disability in the western world.

[0402] Traumatic brain injury (TBI) is one of the most serious reasons for hospital admission and disability in modern society. Clinical experience suggests that TBI may be classified into primary damage occurring immediately after injury, and secondary damage, which occurs during several days post injury. Current therapy of TBI is either surgical or else mainly symptomatic.

### Cerebrovascular Diseases

[0403] Cerebrovascular diseases occur predominately in the middle and late years of life. They cause approximately 200,000 deaths in the United States each year as well as considerable neurological disability. The incidence of stroke increases with age and affects many elderly people, a rapidly growing segment of the population. These diseases cause either ischemia-infarction or intracranial hemorrhage.

### Stroke

[0404] Stroke is an acute neurological injury occurring as a result of interrupted blood supply, resulting in an insult to the brain. Most cerebrovascular diseases present as the abrupt onset of focal neurological deficit. The deficit may remain fixed, or it may improve or progressively worsen, leading usually to irreversible neuronal damage at the core of the ischemic focus, whereas neuronal dysfunction in the penumbra may be treatable and/or reversible. Prolonged periods of ischemia result in frank tissue necrosis. Cerebral edema follows and progresses over the subsequent 2 to 4 days. If the region of the infarction is large, the edema may produce considerable mass effect with all of its attendant consequences.

[0405] Neuroprotective drugs are being developed in an effort to rescue neurons in the penumbra from dying, though as yet none has been proven efficacious.

[0406] Damage to neuronal tissue can lead to severe disability and death. The extent of the damage is primarily affected by the location and extent of the injured tissue. Endogenous cascades activated in response to the acute insult play a role in the functional outcome. Efforts to minimize, limit and/or reverse the damage have the great potential of alleviating the clinical consequences.

[0407] In various embodiments pharmaceutical compositions for treatment of MD, DR and spinal cord injury may be comprised of the following compound combinations:
[0408] 1) The chemically modified RTP801 siRNA of the invention combined with either of VEGF siRNA, VEGF-R1 siRNA, VEGF R2 siRNA, PKC beta siRNA, MCP1 siRNA, eNOS siRNA, KLF2 siRNA, RTP801L siRNA (either physically mixed or in a tandem molecule);
[0409] 2) The chemically modified RTP801 siRNA of the invention in combination with two or more siRNAs of the above list (physically mixed or in a tandem molecule encoding three siRNAs, or a combination thereof).

### Organ Transplantation

[0410] In various embodiments the chemically modified siRNA compounds of the invention are useful for treating or preventing injury, including reperfusion injury, following organ transplantation including lung, liver, heart, bone pancreas, intestine, skin, blood vessels, heart valve, bone and kidney transplantation.

[0411] The term “organ transplant” is meant to encompass transplant of any one or more of the following organs including, inter alia, lung, kidney, heart, skin, vein, bone, cartilage, liver transplantation. Although a xenotransplant can be contemplated in certain situations, an allotransplant is usually preferable. An autograft can be considered for bone marrow, skin, bone, cartilage and or blood vessel transplantation.

[0412] The siRNA compounds of the present invention are particularly useful in treating a subject experiencing the adverse effects of organ transplant, including ameliorating, treating or preventing perfusion injury.

[0413] For organ transplantation, either the donor or the recipient or both may be treated with a chemically modified siRNA compound of the present invention or pharmaceutical composition comprising at least one of the siRNA compounds of the invention. Accordingly, the present invention relates to a method of treating an organ donor or an organ recipient comprising the step of administering to the organ donor or organ recipient or both a therapeutically effective amount of at least one chemically modified siRNA compound according to the present invention.

[0414] The invention further relates to a method for preserving an organ comprising contacting the organ with an effective amount of at least one siRNA compound of the present invention. Also provided is a method for reducing or preventing injury (in particular reperfusion injury) of an organ during surgery and/or following removal of the organ from a subject comprising placing the organ in an organ preserving solution wherein the solution comprises at least one chemically modified siRNA compound according to the present invention.

### Delayed Graft Function

[0415] Delayed graft function (DGF) is the most common complication of the immediate postoperative period in renal transplantation and results in poor graft outcome (Mores et al. 1999. Nephrol. Dial. Transplant. 14(4):930-35). Although the incidence and definition of DGF vary among transplant centers, the consequences are invariable: prolonged hospital stay, additional invasive procedures, and additional cost to the patient and health-care system.

[0416] Graft rejection has been categorized into three subsets depending on the onset of graft destruction: (i) hyperacute rejection is the term applied to very early graft destruction, usually within the first 48 hours; (ii) acute rejection has an onset of several days to months or even years after transplantation and can involve humoral and/or cellular mechanisms; (iii) Chronic rejection relates to chronic alloreactive immune response.

### Acute Lung Transplant Rejection

[0417] Acute allograft rejection remains a significant problem in lung transplantation despite advances in immunosuppressive medication. Rejection, and ultimately early morbidity and mortality may result from ischemia-reperfusion (FR) injury and hypoxic injury.

### Other Diseases and Conditions

[0418] In other embodiments the chemically modified siRNA compounds of the invention are useful for treating or preventing the incidence or severity of other diseases and conditions including, without being limited to, diseases or disorders associated with uncontrolled, pathological cell growth, e.g. cancer, psoriasis, autoimmune diseases, inter alia. “Cancer” or “Tumor” refers to an uncontrolled growing mass of abnormal cells. These terms include both primary tumors, which may be benign or malignant, as well as secondary tumors, or metastases which have spread to other sites in the body. Examples of cancer-type diseases include, inter alia: carcinoma (e.g.: breast, colon and lung), leukemia such as B cell leukemia, lymphoma such as B-cell lymphoma, blastoma such as neuroblastoma and melanoma.

[0419] In further embodiments, the siRNA compounds of the invention are directed to providing neuroprotection, or to provide cerebroprotection, or to prevent and/or treat cytotoxic T cell and natural killer cell-mediated apoptosis associated with autoimmune disease and transplant rejection, or to prevent cell death of cardiac cells including heart failure, cardiomyopathy, viral infection or bacterial infection of heart, myocardial ischemia, myocardial infarct, and myocardial ischemia, coronary artery by-pass graft, or to prevent and/or treat mitochondrial drug toxicity e.g. as a result of chemotherapy or HIV therapy, to prevent cell death during viral infection or bacterial infection, or to prevent and/or treat inflammation or inflammatory diseases, inflammatory bowel disease, sepsis and septic shock, or to prevent cell death from follicle to ovocyte stages, from ovocyte to mature egg stages and sperm (for example, methods of freezing and transplanting ovarian tissue, artificial fertilization), or to preserve fertility in mammals after chemotherapy, in particular human mammals, or to prevent and/or treat, macular degeneration, or to prevent and/or treat acute hepatitis, chronic active hepatitis, hepatitis-B, and hepatitis-C, or to prevent hair loss, (e.g. hair loss due-to male-pattern baldness, or hair loss due to radiation, chemotherapy or emotional stress), or to treat or ameliorate skin damage whereby the skin damage may be due to exposure to high levels of radiation, heat, chemicals, sun, or to burns and autoimmune diseases), or to prevent cell death of bone marrow cells in myelodysplastic syndromes (MDS), to treat pancreatitis, to treat rheumatoid arthritis, psoriasis, glomerulonephritis, atherosclerosis, and graft versus host disease (GVHD), or to treat retinal pericyte apoptosis, retinal damages resulting from ischemia, diabetic retinopathy, or to treat any disease states associated with an increase of apoptotic cell death.

[0420] In other embodiments the chemically modified siRNA compounds of the invention are useful for treating or preventing the incidence or severity of other diseases and conditions in a patient. These diseases and conditions include stroke and stroke-like situations (e.g. cerebral, renal, cardiac failure), neuronal cell death, brain injuries with or without reperfusion issues.

### Oral Mucositis

[0421] Oral mucositis, also referred to as a stomatitis, is a common and debilitating side effect of chemotherapy and radiotherapy regimens, which manifests itself as erythema and painful ulcerative lesions of the mouth and throat. Routine activities such as eating, drinking, swallowing, and talking may be difficult or impossible for subjects with severe oral mucositis. Palliative therapy includes administration of analgesics and topical rinses.

### Ischemic Conditions and Reperfusion Injury

[0422] Ischemic injury is the most common clinical expression of cell injury by oxygen deprivation. The most useful models for studying ischemic injury involve complete occlusion of one of the end-arteries to an organ (e.g., a coronary artery) and examination of the tissue (e.g., cardiac muscle) in areas supplied by the artery. Complex pathologic changes occur in diverse cellular systems during ischemia. Up to a certain point, for a duration that varies among different types of cells, the injury may be amenable to repair, and the affected cells may recover if oxygen and metabolic substrates are again made available by restoration of blood flow. With further extension of the ischemic duration, cell structure continues to deteriorate, owing to relentless progression of ongoing injury mechanisms. With time, the energetic machinery of the cell—the mitochondrial oxidative powerhouse and the glycolytic pathway—becomes irreparably damaged, and restoration of blood flow (reperfusion) cannot rescue the damaged cell. Even if the cellular energetic machinery were to remain intact, irreparable damage to the genome or to cellular membranes will ensure a lethal outcome regardless of reperfusion. This irreversible injury is usually manifested as necrosis, but apoptosis may also play a role. Under certain circumstances, when blood flow is restored to cells that have been previously made ischemic but have not died, injury is often paradoxically exacerbated and proceeds at an accelerated pace—this is reperfusion injury.

[0423] In other embodiments the chemically modified siRNA compounds of the invention are useful for treating or preventing the incidence or severity of diseases associated with ischemia and lack of proper blood flow, e.g. myocardial infarction (MI) and stroke, are provided.

[0424] Reperfusion injury may occur in a variety of conditions, especially during medical intervention, including but not limited to angioplasty, cardiac surgery or thrombolysis; organ transplant; as a result of plastic surgery; during severe compartment syndrome; during re-attachment of severed limbs; as a result of multiorgan failure syndrome; in the brain as a result of stroke or brain trauma; in connection with chronic wounds such as pressure sores, venous ulcers and diabetic ulcers; during skeletal muscle ischemia or limb transplantation; as a result of mesenteric ischemia or acute ischemic bowel disease; respiratory failure as a result of lower torso ischemia, leading to pulmonary hypertension, hypoxemia, and noncardiogenic pulmonary edema; acute renal failure as observed after renal transplantation, major surgery, trauma, and septic as well as hemorrhagic shock; Sepsis; Retinal ischemia occurring as a result of acute vascular occlusion, leading to loss of vision in a number of ocular diseases such as acute glaucoma, diabetic retinopathy, hypertensive retinopathy, and retinal vascular occlusion; Cochlear ischemia; flap failure in microvascular surgery for head and neck defects; Raynaud's phenomenon and the associated digital ischemic lesions in scleroderma; spinal cord injury; vascular surgery; Traumatic rhabdomyolysis (crush syndrome); and myoglobinuria.

[0425] Further, ischemia/reperfusion may be involved in the following conditions: hypertension, hypertensive cerebral vascular disease, rupture of aneurysm, a constriction or obstruction of a blood vessel—as occurs in the case of a thrombus or embolus, angioma, blood dyscrasias, any form of compromised cardiac function including cardiac arrest or failure, systemic hypotension, cardiac arrest, cardiogenic shock, septic shock, spinal cord trauma, head trauma, seizure, bleeding from a tumor; and diseases such as stroke, Parkinson's disease, epilepsy, depression, ALS, Alzheimer's disease, Huntington's disease and any other disease-induced dementia (such as HIV induced dementia for example).

[0426] Additionally, an ischemic episode may be caused by a mechanical injury to the Central Nervous System, such as results from a blow to the head or spine. Trauma can involve a tissue insult such as an abrasion, incision, contusion, puncture, compression, etc., such as can arise from traumatic contact of a foreign object with any locus of or appurtenant to the head, neck, or vertebral column. Other forms of traumatic injury can arise from constriction or compression of CNS tissue by an inappropriate accumulation of fluid (for example, a blockade or dysfunction of normal cerebrospinal fluid or vitreous humor fluid production, turnover, or volume regulation, or a subdural or intracarnial hematoma or edema). Similarly, traumatic constriction or compression can arise from the presence of a mass of abnormal tissue, such as a metastatic or primary tumor.

### Pressure Sores

[0427] Pressure sores or pressure ulcers, are areas of damaged skin and tissue that develop when sustained pressure (usually from a bed or wheelchair) cuts off circulation to vulnerable parts of the body, especially the skin on the buttocks, hips and heels. The lack of adequate blood flow leads to ischemic necrosis and ulceration of the affected tissue. Pressure sores occur most often in patients with diminished or absent sensation or who are debilitated, emaciated, paralyzed, or long bedridden. Tissues over the sacrum, ischia, greater trochanters, external malleoli, and heels are especially susceptible; other sites may be involved depending on the patient's position.

[0428] Pressure sores are wounds which normally only heal very slowly and especially in such cases an improved and more rapid healing is of course of great importance for the patient. Furthermore, the costs involved in the treatment of patients suffering from such wounds are markedly reduced when the healing is improved and takes place more rapidly.

[0429] All the diseases and indications disclosed herein above, as well as other diseases and conditions described herein such as MI may also be treated by the compounds of this invention. Any of the above conditions can also be treated by compositions comprising any of the siRNAs disclosed in co-assigned PCT publication Nos WO 2006/023544 and WO 2007/084684. New effective therapies to treat the above mentioned diseases and disorders would be of great therapeutic value.

[0430] Additionally, the chemically modified RTP801 siRNA of the invention can be linked (covalently or non-covalently) to antibodies, in order to achieve enhanced targeting for treatment of the diseases disclosed herein, according to the following:

ARF: anti-Fas antibody (preferably neutralizing antibodies).
Macular degeneration, diabetic retinopathy, spinal cord injury: anti-Fas antibody, anti-MCP1 antibody, anti-VEGFR1 and anti-VEGFR2 antibody. The antibodies should preferably be neutralizing antibodies.

[0431] The invention has been described in an illustrative manner, and it is to be understood that the terminology used is intended to be in the nature of words of description rather than of limitation.

[0432] Obviously, many modifications and variations of the present invention are possible in light of the above teachings. It is, therefore, to be understood that within the scope of the appended claims, the invention can be practiced otherwise than as specifically described.

[0433] Throughout this application, various publications, including United States patents, are referenced by author and year and patents by number. The disclosures of these publications and patents and patent applications in their entireties are hereby incorporated by reference into this application in order to more fully describe the state of the art to which this invention pertains.

[0434] The present invention is illustrated in detail below with reference to examples, but is not to be construed as being limited thereto.

[0435] Citation of any document herein is not intended as an admission that such document is pertinent prior art, or considered material to the patentability of any claim of the present application. Any statement as to content or a date of any document is based on the information available to applicant at the time of filing and does not constitute an admission as to the correctness of such a statement.

### EXAMPLES

[0436] Without further elaboration, it is believed that one skilled in the art can, using the preceding description, utilize the present invention to its fullest extent. The following preferred specific embodiments are, therefore, to be construed as merely illustrative, and not limitative of the claimed invention in any way.

[0437] Standard molecular biology protocols known in the art not specifically described herein are generally followed essentially as in Sambrook et al., Molecular cloning: A laboratory manual, Cold Springs Harbor Laboratory, New-York (1989, 1992), and in Ausubel et al., Current Protocols in Molecular Biology, John Wiley and Sons, Baltimore, Md. (1988), and as in Ausubel et al., Current Protocols in Molecular Biology, John Wiley and Sons, Baltimore, Md. (1989) and as in Perbal, A Practical Guide to Molecular Cloning, John Wiley & Sons, New York (1988), and as in Watson et al., Recombinant DNA, Scientific American Books, New York and in Birren et al (eds) Genome Analysis: A Laboratory Manual Series, Vols. 1-4 Cold Spring Harbor Laboratory Press, New York (1998) and methodology as set forth in U.S. Pat. Nos. 4,666,828; 4,683,202; 4,801,531; 5,192,659 and 5,272,057 and incorporated herein by reference. Polymerase chain reaction (PCR) was carried out generally as in PCR Protocols: A Guide To Methods And Applications, Academic Press, San Diego, Calif. (1990). In situ (In cell) PCR in combination with Flow Cytometry can be used for detection of cells containing specific DNA and mRNA sequences (Testoni et al., 1996, Blood 87:3822.) Methods of performing RT-PCR are also well known in the art.

### Cell Culture

[0438] HeLa cells (American Type Culture Collection) are cultured as described in Czauderna, et al. (Nucleic Acids Res, 2003. 31, 670-82).

[0439] Human keratinocytes are cultured at 37° C. in Dulbecco's modified Eagle medium (DMEM) containing 10% FCS.

[0440] The mouse cell line B16V (American Type Culture Collection) is cultured at 37° C. in Dulbecco's modified Eagle medium (DMEM) containing 10% FCS. Culture conditions are as described in Methods Find Exp Clin Pharmacol. 1997 May; 19(4):231-9.

[0441] In each case, the cells are subjected to the experiments as described herein at a density of about 50,000 cells per well and the double-stranded nucleic acid according to the present invention is added at a concentration of 20 nM, whereby the double-stranded nucleic acid is complexed using 1 μg/ml of a proprietary lipid (Lipofectamine™) as described below.

### Induction of Hypoxia-Like Conditions

[0442] The cells were treated with CoCl2 for inducing a hypoxia-like condition as follows: siRNA transfections were carried out in 10-cm plates (30-50% confluency) as described by Czauderna et al., 2003, supra. Briefly, siRNA were transfected by adding a preformed 10× concentrated complex of GB and lipid in serum-free medium to cells in complete medium. The total transfection volume was 10 ml. The final lipid concentration was 1.0 μg/ml; the final siRNA concentration was 20 nM unless otherwise stated. Induction of the hypoxic responses was carried out by adding CoCl₂ (100 μM) directly to the tissue culture medium 24 h before lysis.

### Example 1

### Preparation and Testing of siRNA Compounds

[0443] Selection of siRNA Oligonucleotides

[0444] Using proprietary algorithms and the known sequence of gene RTP801 (SEQ ID NO:1), the sequences of many potential siRNAs were generated. In addition to the algorithm, some of the 23-mer oligomer sequences were generated by 5′ and/or 3′ extension of the 19-mer sequences. The sequences that have been generated using this method are fully complementary to the corresponding mRNA sequence. siRNA molecules according to the above specifications are prepared essentially as described herein. Tables A-I SEQ ID. NOS:3-3624 show sense and antisense oligonucleotides useful in the preparation of siRNA compounds that target RTP801. In general, the siRNAs having specific sequences that are selected for in vitro testing are specific for both human and at least a second species such as rat or rabbit. In Tables A-I the following abbreviations are used for cross-species activity: Chn-Chinchilla; Cyn-Cynomolgus; GP-guinea-pig; Rb-rabbit; Ms-mouse; Mnk-Monkey; Chmp-chimpanzee.

[0445] The siRNA compounds of the present invention are synthesized by any methods described herein, infra.

[0446] In Vitro Data

[0447] Activity and stability results obtained with specific siRNA compounds of the present invention are provided hereinbelow. About 1.5-2×105 cells (HeLa cells or 293T cells for siRNA targeting human genes and NRK52 cells or NMUMG cells for siRNA targeting rat/mouse genes) are seeded per well in a 6 well plate (70-80% confluent).

[0448] After 24 hours (h) cells are transfected with siRNA oligos using Lipofectamine™ 2000 reagent (Invitrogene) at final concentration of 500 pM, 5 nM, 20 nM or 40 nM. The cells are incubated at 37° C. in a CO₂ incubator for 72 h.

[0449] As positive control for cell transfection, PTEN-Cy3 labeled siRNA oligos are used. As negative control for siRNA activity GFP siRNA oligos are used.

[0450] At about 72 h after transfection cells are harvested and RNA is extracted from cells.

[0451] siRNA Compounds

[0452] Tables A-I detail siRNA sequences of the present invention, which may be combined with any of the modifications/structures disclosed herein, to create novel RTP801 siRNA compounds.

[0453] The following Tables 1-2 detail in vitro activity and stability results achieved with various structures of RTP801 siRNA:

| | | | Activity | | | |
|---|---|---|---|---|---|---|
| | | | at | | Stability | Stability |
| | | | 20 nM-% | | in | in |
| siRNA- | rX2p = 2′-5′-nucs; | 3′- | target | | rat | human |
| duplex | s-sense strand | end | gene | IC50 | serum | serum |
| name | as-antisens strand | Pi | KD | (nM) | (hrs) | (hrs) |
| Redd14- | s-5′- | y | 88; | 0.36 | 10 | 10- |
| 2-5- | rGrUrGrCrCrArArCrCrUrGr | | 56 | | | good; |
| #10 | ArUrGrCrArG2prC2prU2p- | | | | | 24 |
| | 3′ (2′) | | | | | (slight |
| | as-5′- | y | | | | deg) |
| | mArGmCrUmGrCmArUmCrAmGr | | | | | |
| | GmUrUmGrGmCrAmC-3′ | | | | | |
| Redd14- | s-5′- | y | 58 | | | |
| 2Methyl | mGmUmGmCmCrArArCrCrUrGr | | | | | |
| #5 | ArUrGrCrArGrCrU-3′ | | | | | |
| | as-5′- | y | | | | |
| | rArGrCrUrGrCrArUrCrArGr | | | | | |
| | GrUrUmGmGmCmAmC-3′ | | | | | |
| Redd14- | s-5′- | y | 42 | | | |
| Sp#1 | rGrUrGrCrCrArArCrCrUrGr | | | | | |
| | ArUrGrCrArGLdCLdU-3′ | | | | | |
| | as-5′- | y | | | | |
| | rArGrCrUrGrCrArUrCrArGr | | | | | |
| | GrUrUrGrGrCrALdC-3′ | | | | | |
| Redd14- | s-5′- | y | 37; | 5.1 | 10 | 10 |
| Methyl- | mGmUmGmCmCmArArCrCrUrGr | | 25 | | | with |
| 2-5 | ArUrGrCrArGLdCLdU-3′ | | | | | deg |
| | as-5′- | y | | | | |
| | rArGrCrUrGrCrArUrCrArGr | | | | | |
| | GrUrUmGmGmCmAmC-3′ | | | | | |
| Redd14- | s-5′- | y | 94 | | | |
| Sp#1_2 | rGrUrGrCrCrArArCrCrUrGr | | | | | |
| Me-as | ArUrGrCrArGLdCLdU-3′ | | | | | |
| | as-5′- | y | | | | |
| | mAmGrCrUrGrCrArUrCrArGr | | | | | |
| | GrUrUrGrGrCrALdC-3′ | | | | | |
| Redd14- | s-5′- | y | 20; 27; | 1.57 | 24 | 24 |
| Sp#10 | rGrUrGrCrCrArArCrCrUrGr | | 29 | | | with |
| | ArUrGrCrArGLdCLdU-3′ | | | | | deg |
| | as-5′- | y | | | | |
| | mArGmCrUmGrCmArUmCrAmGr | | | | | |
| | GmUrUmGrGmCrAmC-3′ | | | | | |
| Redd14- | s-5′- | y | 96 | | | |
| Sp#1_2 | mGmUrGrCrCrArArCrCrUrGr | | | | | |
| Me-as-s | ArUrGrCrArGLdCLdU-3′ | | | | | |
| | as-5′- | y | | | | |
| | mAmGrCrUrGrCrArUrCrArGr | | | | | |
| | GrUrUrGrGrCrALdC-3′ | | | | | |
| Redd14- | s-5′- | y | 49 | | | |
| 2Me#5- | mGmUmGmCmCmArArCrCrUrGr | | | | | |
| Br-s | ArUrGrCrArG2prC2prU2p- | | | | | |
| | 3′ | | | | | |
| | as-5′- | y | | | | |
| | rArGrCrUrGrCrArUrCrArGr | | | | | |
| | GrUrUmGmGmCmAmC-3′ | | | | | |
| Redd14- | s-5′- | y | 114; | | 10 | 24 |
| 2Me#6- | mGmUmGmCmCmAAmCrCrUrGrA | | 43; 108 | | | with |
| Br-s- | rUrGrCrArG2prC2prU2p-3′ | | | | | deg |
| Sp-as | as-5′- | y | | | | |
| | mAmGrCrUrGrCrArUrCrArGr | | | | | |
| | GrUrUrGrGrCrALdC-3′ | | | | | |
| 1DDIT4_2- | s-5′- | dT | 41 | | | |
| S/ | rUrArCrUrGrUrArGrCrArUr | | | | | |
| 1DDIT4_2- | GrArArArCrA2prA2prA2p- | | | | | |
| AS | dT-3′ | | | | | |
| | AS-5′- | | | | | |
| | rUrUrUrGrUrUrUrCrArUrGr | | | | | |
| | CrUrArCrArG2prU2prA2p- | | | | | |
| | dT-3′ | | | | | |
| 2DDIT4_2- | S-5′- | dT | 75 | | | |
| S/ | rU2prA2prC2prUrGrUrArGr | | | | | |
| 1DDIT4_2- | CrArUrGrArArArCrArArA- | | | | | |
| AS | dT-3′ | | | | | |
| | AS-5′- | | | | | |
| | rUrUrUrGrUrUrUrCrArUrGr | | | | | |
| | CrUrArCrArG2prU2prA2p- | | | | | |
| | dT-3′ | | | | | |
| 1DDIT4_2- | S-5′- | 3′ + | 36 | | | 0 |
| S/ | rUrArCrUrGrUrArGrCrArUr | 5′ | | | | |
| 1DDIT4_2- | GrArArArCrA2prA2prA2p- | | | | | |
| AS- | 3′ | | | | | |
| Blunt | AS-5′- | | | | | |
| | rUrUrUrGrUrUrUrCrArUrGr | | | | | |
| | CrUrArCrArG2prU2prA2p- | | | | | |
| | 3′ | | | | | |
| 2DDIT4_2- | S-5′- | 3′ + | 77 | | | 0 |
| S/ | rU2prA2prC2pUrGrUrArGrC | 5′ | | | | |
| 1DDIT4_2- | rArUrGrArArArCrArArA-3′ | | | | | |
| AS- | AS-5′- | | | | | |
| Blunt | rUrUrUrGrUrUrUrCrArUrGr | | | | | |
| | CrUrArCrArG2prU2prA2p- | | | | | |
| | 3′ | | | | | |

DDIT4_2: (SEN: SEQ ID NO: 817; AS: SEQ ID NO: 1243)

TABLE 2

| | | | | | KD at 20 nM | |
|---|---|---|---|---|---|---|
| | | | | | (% residual | Stability |
| | | | | | mRNArelative | in human serum |
| Name | Sense | AS | Sense 5->3 | AS 5->3 | to CNL) | (hrs) |
| DDIT4_2_S236 | 17,18,19- | 17,18,19- | rU; rA; rC; rU; rG; rU; rA; | rU; rU; rU; rG; rU; rU; rU; | 41 | |
| | 2′-5′-bridge; | 2′-5′- | rG; rC; rA; rU; rG; rA; rA; | rC; rA; rU; rG; rC; rU; rA; | | |
| | 20-dT-3′-Pi | bridge; 20-dT-3′-Pi | rA; rC; rA2p; rA2p; rA2p; | rC; rA; rG2p; rU2p; rA2p; | | |
| | | | dT$ | dT$ | | |
| DDIT4_2_S237 | 1,2,3- | 17,18,19- | rU2p; rA2p; rC2p; rU; rG; | rU; rU; rU; rG; rU; rU; rU; | 75 | |
| | 2′-5′-bridge; | 2′-5′- | rU; rA; rG; rC; rA; rU; rG; | rC; rA; rU; rG; rC; rU; rA; | | |
| | 20-dT-3′-Pi | bridge; 20-dT-3′-Pi | rA; rA; rA; rC; rA; rA; rA; | rC; rA; rG2p; rU2p; rA2p; | | |
| | | | dT$ | dT$ | | |
| DDIT4_2_S729 | 17,18,19- | 17,18,19- | rU; rA; rC; rU; rG; rU; rA; | rU; rU; rU; rG; rU; rU; rU; | 36 | |
| | 2′-5′- | 2′-5′- | rG; rC; rA; rU; rG; rA; rA; | rC; rA; rU; rG; rC; rU; rA; | | |
| | bridge; Phosphate | bridge; Phosphate | rA; rC; rA2p; rA2p; rA2p | rC; rA; rG2p; rU2p; rA2p | | |
| DDIT4_2_S730 | 1,2,3- | 17,18,19- | rU2p; rA2p; rC2p; rU; rG; | rU; rU; rU; rG; rU; rU; rU; | 77 | |
| | 2′-5′-bridge; | 2′-5′- | rU; rA; rG; rC; rA; rU; rG; | rC; rA; rU; rG; rC; rU; rA; | | |
| | Phosphate | bridge; Phosphate | rA; rA; rA; rC; rA; rA; rA | rC; rA; rG2p; rU2p; rA2p | | |
| DDIT4_2_S2 | 17,18- | 17,18-2′- | rU; rA; rC; rU; rG; rU; rA; | rU; rU; rU; rG; rU; rU; rU; | | |
| | 2′-5′- | 5′-bridge | rG; rC; rA; rU; rG; rA; rA; | rC; rA; rU; rG; rC; rU; rA; | | |
| | bridge | | rA; rC; rA2p; rA2p; rA$ | rC; rA; rG2p; rU2p; rA$ | | |
| DDIT4_1_S650 | 18,19- | 1,2-2′- | rG; rU; rG; rC; rC; rA; rA; | mA; mG; rC; rU; rG; rC; rA; | 94 | |
| | L- | OMe-3′- | rC; rC; rU; rG; rA; rU; rG; | rU; rC; rA; rG; rG; rU; | | |
| | DNA- | Pi; 19-L- | rC; rA; rG; LdC; LdT | rU; rG; rG; rC; rA; LdC | | |
| | 3′- | DNA-3′- | | | | |
| | Pi; Phosphate | Pi; Phosphate | | | | |
| DDIT4_1_S651 | 18,19- | 1,3,5,7,9,11, | rG; rU; rG; rC; rC; rA; rA; | mA; rG; mC; rU; mG; rC; | 20 | 24 |
| | L- | 1,13,15,17, | rC; rC; rU; rG; rA; rU; rG; | mA; rU; mC; rA; rnG; rG; | | |
| | DNA- | 19-2′- | rC; rA; rG; LdC; LdT | mU; rU; mG; rG; mC; | | |
| | 3′- | OMe-3′- | | rA; mC | | |
| | Pi; Phosphate | Pi; Phosphate | | | | |
| DDIT4_1_S654 | 1,2-2′- | 1,2-2′- | mG; mU; rG; rC; rC; rA; rA; | mA; mG; rC; rU; rG; rC; rA; | 42 | |
| | OMe- | OMe-3′- | rC; rC; rU; rG; rA; rU; rG; | rU; rC; rA; rG; rG; rU; | | |
| | 3′- | Pi; 19-L- | rC; rA; rG; LdC; LdT | rU; rG; rG; rC; rA; LdC | | |
| | Pi; 18,19- | DNA-3′- | | | | |
| | L-DNA-3′- | Pi; Phosphate | | | | |
| | Pi; Phosphate | | | | | |
| DDIT4_1_S8 | 1,2-2′- | 1,2-2′- | mG; mU; rG; rC; rC; rA; rA; | mA; mG; rC; rU; rG; rC; rA; | 96 | |
| | OMe- | OMe-3′- | rC; rC; rU; rG; rA; rU; rG; | rU; rC; rA; rG; rG; rU; | | |
| | 3′- | Pi; 19-L- | rC; rA; rG; LdC; LdT$ | rU; rG; rG; rC; rA; LdC$ | | |
| | Pi; 18,19- | DNA-3′-Pi | | | | |
| | L-DNA-3′-Pi | | | | | |
| DDIT4_1_S9 | 1,2,3,4, | 15,16,17,18, | mG; mU; mG; mC; mC; | rA; rG; rC; rU; rG; rC; rA; | 49 | |
| | 5,6-2′- | 19-2′- | mA; rA; rC; rC; rU; rG; rA; | rU; rC; rA; rG; rG; rU; rU; | | |
| | OMe- | OMe-3′-Pi | rU; rG; rC; rA; rG2p; rC2p; | mG; mG; mC; mA; mC$ | | |
| | 3′- | | rU$ | | | |
| | Pi; 17,18- | | | | | |
| | 2′-5′-bridge | | | | | |
| DDIT4_1_S653 | 1,2,3,4, | 1,2-2′-OMe-3′-Pi; | mG; mU; mG; mC; mC; | mA; mG; rC; rU; rG; rC; rA; | 67 | |
| | 5,6-2′- | 19-L-DNA-3′-Pi; | mA; rA; rC; rC; rU; rG; rA; | rU; rC; rA; rG; rG; rU; | | |
| | OMe- | Phosphate | rU; rG; rC; rA; rG2p; rC2p; | rU; rG; rG; rC; rA; LdC | | |
| | 3′-Pi; | | rU2p | | | |
| | 17,18, 19-2′-5′-bridge; | | | | | |
| | Phosphate | | | | | |
| DDIT4_1_S652 | 17,18,19- | 1,3,5,7,9,11, | rG; rU; rG; rC; rC; rA; rA; | mA; rG; mC; rU; mG; rC; | 56 | 10 |
| | 2′-5′- | 13,15,17, | rC; rC; rU; rG; rA; rU; rG; | mA; rU; mC; rA; mG; rG; | | |
| | bridge; | 19-2′- | rC; rA; rG2p; rC2p; rU2p | mU; rU; mG; rG; mC; | | |
| | Phosphate | OMe-3′- | | rA; mC | | |
| | | Pi; Phosphate | | | | |
| DDIT4_1_S4 | 1,2,3,4, | 15,16,17,18, | mG; mU; mG; mC; mC; rA; | rA; rG; rC; rU; rG; rC; rA; | 58 | |
| | 5-2′- | 19-2′- | rA; rC; rC; rU; rG; rA; rU; | rU; rC; rA; rG; rG; rU; rU; | | |
| | OMe- | OMe-3′-Pi | rG; rC; rA; rG; rC; rU$ | mG; mG; mC; mA; mC$ | | |
| | 3′-Pi | | | | | |
| DDIT4_1_S648 | 18,19- | 19-L- | rG; rU; rG; rC; rC; rA; rA; | rA; rG; rC; rU; rG; rC; rA; | 42 | |
| | L- | DNA-3′-Pi | rC; rC; rU; rG; rA; rU; rG; | rU; rC; rA; rG; rG; rU; rU; | | |
| | DNA-3′-Pi | | rC; rA; rG; LdC; LdT | rG; rG; rC; rA; LdC | | |
| DDIT4_1_S655 | 1,2,3,4, | 15,16,17,18, | mG; mU; mG; mC; mC; | rA; rG; rC; rU; rG; rC; rA; | 25 | 10 |
| | 5,6-2′- | 19-2′- | mA; rA; rC; rC; rU; rG; rA; | rU; rC; rA; rG; rG; rU; rU; | | |
| | OMe- | OMe-3′- | rU; rG; rC; rA; rG; LdC; | mG; mG; mC; mA; mC | | |
| | 3′- | Pi; Phosphate | LdT | | | |
| | Pi; 18,19-L-DNA-3′- | | | | | |
| | Pi; Phosphate | | | | | |
| DDIT4_1_S1 | 17,18-2′-5′-bridge | 1,3,5,7,9,11, | rG; rU; rG; rC; rC; rA; rA; | mA; rG; mC; rU; mG; rC; | | |
| | | 13,15,17, | rC; rC; rU; rG; rA; rU; rG; | mA; rU; mC; rA; mG; rG; | | |
| | | 19-2′-OMe-3′-Pi | rC; rA; rG2p; rC2p; rU$ | mU; rU; mG; rG; mC; | | |
| | | | | rA; mC$ | | |

DDIT4_1 = Redd14 (SEN SEQ ID NO: 66, AS SEQ ID NO: 16)

[0454] Table 3 hereinbelow provides a code of the modified nucleotides/unconventional moieties ultilized in preparing the siRNA ologonucleotides of the present invention.

TABLE 3

| Code | modification |
|---|---|
| Nuc | |
| 5medG | 5-methyl-deoxyriboguanosine-3′-phosphate |
| c6Np | Amino modifier C6 (Glen Research 10-1906-xx) |
| dA | deoxyriboadenosine-3′-phosphate |
| dB | abasic deoxyribose-3′-phosphate |
| dC | deoxyribocytidine-3′-phosphate |
| dG | deoxyriboguanosine-3′-phosphate |
| dT | thymidine-3′-phosphate |
| dT$ | thymidine (no phosphate) |
| enaA$ | ethylene-bridged nucleic acid adenosine (no phosphate) |
| enaC | ethylene-bridged nucleic acid cytidine 3′ phosphate |
| enaG | ethylene-bridged nucleic acid guanosine 3′ phosphate |
| enaT | ethylene-bridged nucleic acid thymidine 3′ phosphate |
| iB | inverted deoxyabasic |
| LdA | L-deoxyriboadenosine-3′-phosphate (mirror image dA) |
| LdA$ | L-deoxyriboadenosine (no phosphate) (mirror image dA) |
| LdC | L-deoxyribocyt0idine-3′-phosphate (mirror image dC) |
| LdC$ | L-deoxyribocytidine (no phosphate) (mirror image dC) |
| LdG | L-deoxyriboguanosine-3′-phosphate (mirror image dG) |
| LdT | L-deoxyribothymidine-3′-phosphate (mirror image dT) |
| LdT$ | L-deoxyribothymidine (no phosphate) (mirror image dT) |
| mA | 2′-O-methyladenosine-3′-phosphate |
| mA$ | 2′-O-methyladenosine (no phosphate) |
| mC | 2′-O-methylcytidine-3′-phosphate |
| mC$ | 2′-O-methylcytidine (no 3′-phosphate) |
| mG | 2′-O-methylguanosine-3′-phosphate |
| mG$ | 2′-O-methylguanosine (no phosphate) |
| mU | 2′-O-methyluridine-3′-phosphate |
| mU$ | 2′-O-methyluridine (no phosphate) |
| rA | riboadenosine-3′-phosphate |
| rA$ | riboadenosine (no phosphate) |
| rC | ribocytidine-3′-phosphate |
| rC$ | ribocytidine (no phosphate) |
| rC2p | ribocytidine-2′-phosphate |
| rG | riboguanosine-3′-phosphate |
| rG2p | riboguanosine-2′-phosphate |
| rU | ribouridine-3′-phosphate |
| rU$ | ribouridine (no phosphate) |
| rU2p | ribouridine-2′-phosphate |

### Example 2

### Model Systems of Acute Renal Failure (ARF)

[0455] ARF is a clinical syndrome characterized by rapid deterioration of renal function that occurs within days. Without being bound by theory the acute kidney injury may be the result of renal ischemia-reperfusion injury such as renal ischemia-reperfusion injury in patients undergoing major surgery such as major cardiac surgery. The principal feature of ARF is an abrupt decline in glomerular filtration rate (GFR), resulting in the retention of nitrogenous wastes (urea, creatinine). Recent studies, support that apoptosis in renal tissues is prominent in most human cases of ARF. The principal site of apoptotic cell death is the distal nephron. During the initial phase of ischemic injury, loss of integrity of the actin cytoskeleton leads to flattening of the epithelium, with loss of the brush border, loss of focal cell contacts, and subsequent disengagement of the cell from the underlying substratum.

[0456] Testing an active siRNA compound is performed using an animal model for ischemia-reperfusion-induced ARF.

[0457] Protection Against Ischemia-Reperfusion Induced ARF

[0458] Ischemia-reperfusion injury is induced in rats following 45 minutes bilateral kidney arterial clamp and subsequent release of the clamp to allow 24 hours of reperfusion. 12 mg/kg of siRNA compounds are injected into the jugular vein 30 minutes prior to and 4 hours following the clamp. ARF progression is monitored by measurement of serum creatinine levels before (baseline) and 24 hrs post surgery. At the end of the experiment, the rats are perfused via an indwelling femoral line with warm PBS followed by 4% paraformaldehyde. The left kidneys are surgically removed and stored in 4% paraformaldehyde for subsequent histological analysis. Acute renal failure is frequently defined as an acute increase of the serum creatinine level from baseline. An increase of at least 0.5 mg per dL or 44.2 μmol per L of serum creatinine is considered as an indication for acute renal failure. Serum creatinine is measured at time zero before the surgery and at 24 hours post ARF surgery.

[0459] siRNA compounds of the present invention are tested in the above model system and found to be protective against ischemia reperfusion.

[0460] Further, testing active siRNA for treating ARF may also be done using sepsis-induced ARF.

[0461] Two predictive animal models of sepsis-induced ARF are described by Miyaji et al., 2003, Ethyl pyruvate decreases sepsis-induced acute renal failure and multiple organ damage in aged mice, Kidney Int. November; 64(5):1620-31. These two models are lipopolysaccharide administration and cecal ligation puncture in mice, preferably in aged mice.

### Example 3

### Model Systems of Pressure Sores or Pressure Ulcers

[0462] Pressure sores or pressure ulcers including diabetic ulcers, are areas of damaged skin and tissue that develop when sustained pressure (usually from a bed or wheelchair) cuts off circulation to vulnerable parts of the body, especially the skin on the buttocks, hips and heels. The lack of adequate blood flow leads to ischemic necrosis and ulceration of the affected tissue. Pressure sores occur most often in patients with diminished or absent sensation or who are debilitated, emaciated, paralyzed, or long bedridden. Tissues over the sacrum, ischia, greater trochanters, external malleoli, and heels are especially susceptible; other sites may be involved depending on the patient's situation.

[0463] Testing the active inhibitors of the invention (such as siRNA compounds) for treating pressure sore, ulcers and similar wounds is performed in a mouse model described in Reid et al., J Surgical Research. 116:172-180, 2004.

[0464] An additional rabbit model is described by Mustoe et al, JCI, 1991. 87(2):694-703; Ahn and Mustoe, Ann Pl Surg, 1991. 24(1):17-23, and is used for testing the siRNA compounds of the invention. siRNA compounds of the present invention are tested in animal models where it is shown that these siRNA compounds treat and prevent pressure sores and ulcers.

### Example 4

### Model Systems of Chronic Obstructive Pulmonary Disease (COPD)

[0465] Chronic obstructive pulmonary disease (COPD) is characterized mainly by emphysema, which is permanent destruction of peripheral air spaces, distal to terminal bronchioles. Emphysema is also characterized by accumulation of inflammatory cells such as macrophages and neutrophils in bronchioles and alveolar structures. Emphysema and chronic bronchitis may occur as part of COPD or independently.

[0466] Testing the active inhibitors of the invention (such as siRNA) for treating COPD/emphysema/chronic bronchitis is performed in animal models such as those disclosed as follows:

[0467] Starcher and Williams, 1989. Lab. Animals, 23:234-240; Peng, et al., 2004; Am J Respir Crit Care Med, 169:1245-1251; Jeyaseelan et al., 2004. Infect. Immunol, 72: 7247-56. Additional models are described in PCT patent publication WO 2006/023544 assigned to the assignee of the present application, which is hereby incorporated by reference into this application.

[0468] siRNA compounds of the present invention is tested in these animal models, which show that these siRNA compounds treat and/or prevent emphysema, chronic bronchitis and COPD.

### Example 5

### Model Systems of Spinal Cord Injury

[0469] Spinal cord injury, or myelopathy, is a disturbance of the spinal cord that results in loss of sensation and/or mobility. The two common types of spinal cord injury are due to trauma and disease. Traumatic injury can be due to automobile accidents, falls, gunshot, diving accidents inter alia, and diseases which can affect the spinal cord include polio, spina bifida, tumors and Friedreich's ataxia.

[0470] Rats are injected with two different doses of Cy3 labeled siRNA (1 μg/μl, 10 μg/μl) and are left for 1 and 3 days before sacrifice. Histological analyses indicate that many long filamentous profiles take up the labeled siRNA as well as other processes and cell bodies. Immunostaining with antibodies to MAP2 identifies uptake of label into dendrites and into cell bodies of neurons including motorneurons. Staining with other antibodies specific to astrocytes or macrophages reveals lower uptake of Cy3 labeled siRNA as compared to neurons. These results indicate that siRNA molecules injected to the injured spinal-cord will reach the cell body and dendrites of neurons including motorneurons.

[0471] siRNA compounds of the present invention are tested in this animal model, which shows that these siRNA compounds promote functional recovery following spinal cord injury and thus may be used to treat spinal cord injury.

### Example 6

### Model Systems of Glaucoma

[0472] Testing the active inhibitors of the invention for treating or preventing glaucoma is done in the animal model for example as described by Pease et al., J. Glaucoma, 2006, 15(6):512-9 (Manometric calibration and comparison of TonoLab and TonoPen tonometers in rats with experimental glaucoma and in normal mice).

[0473] siRNA compounds of the present invention are tested in this animal model where it is demonstrated that these siRNA compounds treat and/or prevent glaucoma.

### Example 7

### Model Systems of Ischemia/Reperfusion Injury Following Lung Transplantation in Rats

[0474] Testing the active inhibitors of the invention for treating or preventing ischemia/reperfusion injury or hypoxic injury following lung transplantation is done in one or more of the experimental animal models, for example as described by Mizobuchi et al., 2004. J. Heart Lung Transplant, 23:889-93; Huang, et al., 1995. J. Heart Lung Transplant. 14: S49; Matsumura, et al., 1995. Transplantation 59: 1509-1517; Wilkes, et al., 1999. Transplantation 67:890-896; Naka, et al., 1996. Circulation Research, 79: 773-783.

[0475] siRNA compounds of the present invention are tested in these animal models, which show that these siRNA compounds treat and/or prevent ischemia-reperfusion injury following lung transplantation and thus may be used in conjunction with transplant surgery.

### Example 8

### Model Systems of Acute Respiratory Distress Syndrome

[0476] Testing the active inhibitors of the invention for treating acute respiratory distress syndrome is done in the animal model as described by Chen et al (J Biomed Sci. 2003; 10(6 Pt 1):588-92. siRNA compounds of the present invention are tested in this animal model which shows that these siRNAs treat and/or prevent acute respiratory distress syndrome and thus may be used to treat this condition.

### Example 9

### Model Systems of Hearing Loss Conditions

[0477] (i) Distribution of Cy3-PTEN siRNA in the Cochlea Following Local Application to the Round Window of the Ear

[0478] A solution of 1 μg/100 μl of Cy3-PTEN siRNA (total of 0.3-0.4 μg) PBS is applied to the round window of chinchillas. The Cy3-labelled cells within the treated cochlea are analyzed 24-48 hours post siRNA round window application after sacrifice of the chinchillas. The pattern of labeling within the cochlea is similar following 24 h and 48 h and includes labeling in the basal turn of cochlea, in the middle turn of cochlea and in the apical turn of cochlea. Application of Cy3-PTEN siRNA onto scala tympani reveals labeling mainly in the basal turn of the cochlea and the middle turn of the cochlea. The Cy3 signal persists to up to 15 days after the application of the Cy3-PTEN siRNA. The siRNA compounds of the invention are tested in this animal model which shows that there is significant penetration of these siRNA compounds to the basal, middle and apical turns of the cochlea, and that these compounds may be used in the treatment of hearing loss.

### (ii) Chinchilla Model of Carboplatin-Induced or Cisplatin-Induced Cochlea Hair Cell Death

[0479] Chinchillas are pre-treated by direct administration of specific siRNA in saline to the left ear of each animal. Saline is given to the right ear of each animal as placebo. Two days following the administration of the specific siRNA compounds of the invention, the animals are treated with carboplatin (75 mg/kg i.p.) or cisplatin (intraperitoneal infusion of 13 mg/kg over 30 minutes). After sacrifice of the chinchillas (two weeks post carboplatin treatment) the % of dead cells of inner hair cells (IHC) and outer hair cells (OHC) is calculated in the left ear (siRNA treated) and in the right ear (saline treated). It is calculated that the % of dead cells of inner hair cells (IHC) and outer hair cells (OHC) is lower in the left ear (siRNA treated) than in the right ear (saline treated).

(iii) Chinchilla Model of Acoustic-Induced Cochlea Hair Cell Death

[0480] The activity of specific siRNA in an acoustic trauma model is studied in chinchilla. The animals are exposed to an octave band of noise centered at 4 kHz for 2.5 h at 105 dB. The left ear of the noise-exposed chinchillas is pre-treated (48 h before the acoustic trauma) with 30 μg of siRNA in ˜10 μL of saline; the right ear is pre-treated with vehicle (saline). The compound action potential (CAP) is a convenient and reliable electrophysiological method for measuring the neural activity transmitted from the cochlea. The CAP is recorded by placing an electrode near the base of the cochlea in order to detect the local field potential that is generated when a sound stimulus, such as click or tone burst, is abruptly turned on. The functional status of each ear is assessed 2.5 weeks after the acoustic trauma. Specifically, the mean threshold of the compound action potential recorded from the round window is determined 2.5 weeks after the acoustic trauma in order to determine if the thresholds in the siRNA-treated ear are lower (better) than the untreated (saline) ear. In addition, the amount of inner and outer hair cell loss is determined in the siRNA-treated and the control ear.

[0481] siRNA compounds of the present invention are tested in this animal model which shows that the thresholds in the siRNA-treated ear are lower (better) than in the untreated (saline) ear. In addition, the amount of inner and outer hair cell loss is lower in the siRNA-treated ear than in the control ear.

### Example 10

### Model Systems Relating to Macular Degeneration

[0482] The compounds of the present invention are tested in the following an animal model of Choroidal neovascularization (CNV). This hallmark of wet AMD is induced in model animals by laser treatment.

### A) Mouse Model

[0483] Choroidal neovascularization (CNV) induction: Choroid neovascularization (CNV), a hallmark of wet AMD, is triggered by laser photocoagulation (532 nm, 200 mW, 100 ins, 75 μm) (OcuLight GL, Iridex, Mountain View, Calif.) performed on both eyes of each mouse on day 0 by a single individual masked to drug group assignment. Laser spots are applied in a standardized fashion around the optic nerve, using a slit lamp delivery system and a cover slip as a contact lens.

### Evaluation

[0484] For evaluation, the eyes are enucleated and fixed with 4% paraformaldehyde for 30 min at 4° C. The neurosensory retina is detached and severed from the optic nerve. The remaining RPE-choroid-sclera complex is flat mounted in Immu-Mount (Vectashield Mounting Medium, Vector) and covered with a coverslip. Flat mounts are examined with a scanning laser confocal microscope (TCS SP, Leica, Germany). Vessels are visualized by exciting with blue argon laser. The area of CNV-related fluorescence is measured by computerized image analysis using the Leica TCS SP software. The summation of whole fluorescent area in each horizontal section is used as an index for the volume of CNV.

### B) Non-Human Primate Model

[0485] CNV induction: Choroidal neovascularization (CNV) is induced in male Cynomolgus monkeys by perimacular laser treatment of both eyes prior to dose administration. The approximate laser parameters were as follows: spot size: 50-100 μm diameter; laser power: 300-700 milliwatts; exposure time: 0.1 seconds.

[0486] Treatment: Immediately following laser treatment, both eyes of all animals are subjected to a single intravitreal injection. Left eye is dosed with synthetic stabilized siRNA against RTP801, whereas the contralateral eye receives PBS (vehicle).

[0487] siRNA compounds of the present invention are tested in the above animal models of macular degeneration, in which it is shown that RTP801 siRNA molecules are effective in treatment of macular degeneration.

### Example 11

### Model Systems Relating to Microvascular Disorders

[0488] The compounds of the present invention are tested in animal models of a range of microvascular disorders as described below.

[0489] 1. Diabetic Retinopathy

[0490] RTP801 promotes neuronal cell apoptosis and generation of reactive oxygen species in vitro. The assignee of the current invention also found that in RTP801 knockout (KO) mice subjected to the model of retinopathy of prematurity (ROP), pathologic neovascularization NV was reduced under hypoxic conditions, despite elevations in VEGF, whereas the lack of this gene did not influence physiologic neonatal retinal NV. Moreover, in this model, lack of RTP801 was also protective against hypoxic neuronal apoptosis and hyperoxic vaso-obliteration.

### Experiment 1

[0491] Diabetes is induced in RTP801 KO and C57/129sv wildtype (WT) littermate mice by intraperitoneal injection of STZ. After 4 weeks, ERG (single white flash, 1.4×10̂4 ftc, 5 ins) is obtained from the left eye after 1 hour of dark adaptation. RVP is assessed from both eyes using the Evans-blue albumin permeation technique.

### Experiment 2

[0492] Diabetes is induced in RTP801 knockout and in control wild type mice with the matched genetic background. For diabetes induction, the mice are injected with streptozotocin (STZ 90 mg/kg/d for 2 days after overnight fast). Animal physiology is monitored throughout the study for changes in blood glucose, body weight, and hematocrit. Vehicle-injected mice serve as controls. The appropriate animals are treated by intravitreal injections of anti-RTP801 siRNA or anti-GFP control siRNA.

[0493] Retinal vascular leakage is measured using the Evans-blue (EB) dye technique on the animals. Mice have a catheter implanted into the right jugular vein prior to Evans Blue (EB) measurements. Retinal permeability measurements in both eyes of each animal follows a standard Evans-blue protocol.

[0494] Retinopathy of Prematurity

[0495] Retinopathy of prematurity is induced by exposing the test animals to hypoxic and hyperoxic conditions, and subsequently testing the effects on the retina. Results show that RTP801 KO mice are protected from retinopathy of prematurity, thereby validating the protective effect of RTP801 inhibition.

[0496] Myocardial Infarction

[0497] Myocardial infarction is induced by Left Anterior Descending artery ligation in mice, both short term and long term.

[0498] Microvascular Ischemic Conditions

[0499] Animal models for assessing ischemic conditions include:

1. Closed Head Injury (CHI)—Experimental TBI produces a series of events contributing to neurological and neurometabolic cascades, which are related to the degree and extent of behavioral deficits. CHI is induced under anesthesia, while a weight is allowed to free-fall from a prefixed height (Chen et al, J. Neurotrauma 13, 557, 1996) over the exposed skull covering the left hemisphere in the midcoronal plane.
2. Transient middle cerebral artery occlusion (MCAO)—a 90 to 120 minutes transient focal ischemia is performed in adult, male Sprague Dawley rats, 300-370 gr. The method employed is the intraluminal suture MCAO (Longa et al., Stroke, 30, 84, 1989, and Dogan et al., J. Neurochem. 72, 765, 1999). Briefly, under halothane anesthesia, a 3-O-nylon suture material coated with Poly-L-Lysine is inserted into the right internal carotid artery (ICA) through a hole in the external carotid artery. The nylon thread is pushed into the ICA to the right MCA origin (20-23 mm). 90-120 minutes later the thread is pulled off, the animal is closed and allowed to recover.
3. Permanent middle cerebral artery occlusion (MCAO)—occlusion is permanent, unilateral-induced by electrocoagulation of MCA. Both methods lead to focal brain ischemia of the ipsilateral side of the brain cortex leaving the contralateral side intact (control). The left MCA is exposed via a temporal craniotomy, as described for rats by Tamura A. et al., J Cereb Blood Flow Metab. 1981; 1:53-60. The MCA and its lenticulostriatal branch are occluded proximally to the medial border of the olfactory tract with microbipolar coagulation. The wound is sutured, and animals returned to their home cage in a room warmed at 26° C. to 28° C. The temperature of the animals is maintained all the time with an automatic thermostat.

[0500] siRNA compounds of the present invention are tested in the above animal models of microvascular conditions, in which it is shown that RTP801 siRNA molecules ameliorate the symptoms of microvascular conditions.

### Example 12

### Model Systems for Neurodegenerative Diseases and Disorders

[0501] I. Evaluating the Efficacy of Intranasal Administration of siRNA Compounds of the Present Invention in the APP Transgenic Mouse Model of Alzheimer's Disease.

[0502] Animals and Treatment. The study includes twenty-four (24) APP [V717I] transgenic mice (female), a model for Alzheimer's disease (Moechars D. et al., EMBO J. 15(6):1265-74, 1996; Moechars D. et al., Neuroscience. 91(3):819-30), aged 11 months that are randomly divided into two equal groups (Group I and Group II).

[0503] Animals are treated with intranasal administration siRNA (200-400 ug/mice, Group I) and vehicle (Group II), 2-3 times a week, during 3 months.

[0504] Termination. Mice are sacrificed; brains are dissected and process one hemisphere for histology and freeze one hemisphere for shipment.

[0505] Evaluation. The following histological analysis is performed:

1. Anti-Aβ staining and quantification (4 slides/mouse):
2. Thio S staining and quantification (4 slides/mouse):
3. CD45 staining and quantification (4 slides/mouse):
4. GFAP (astrocytosis) staining and quantification.

[0506] II. Evaluating the Efficacy of Intranasal Administration of Specific siRNAs in a BACE-Transgenic Mouse Model of Alzheimer's Disease.

[0507] Objective. The objective of this study is to test the efficacy of intranasal delivery of specific siRNA compounds of the present invention in BACE-transgenic mouse model for Alzheimer disease.

[0508] Animals and Treatment. The study includes twenty (20) BACE-1 transgenic mice (female/male), aged 4 months that are randomly divided into two equal groups. siRNA treatment is initiated at age 4 months. siRNA compounds of the present invention are administered intranasally.

### Evaluation.

[0509] 1. Behavioral test. All animals are monitored and tested for behavioral changes by subjecting the animals to periodical behavioral analysis. Spatial learning and memory in the Morris water maze is used.

[0510] 2. Brain biochemistry. The brains of five (5) mice in each group are subjected to biochemical analysis. Western blot analysis of BACE, APP, CTFs and Aβ is carried out. Assay for BACE enzymatic activity is performed.

[0511] 3. Immunohistochemistry. The left hemibrain of five (5) mice in each group is subjected to immunohistochemical analysis. Expression levels of BACE, APP and CTF are determined.

[0512] 4. Analysis of gene knockdown by qPCR are performed in the right hemibrain of five (5) mice in each group

[0513] III. Evaluating the Efficacy of Intranasal Administration of siRNA in a Mouse Model of ALS.

[0514] Objective. To examine the efficacy of siRNA compounds of the present invention in the mutant SOD1^{G93A} mouse model of ALS.

[0515] Animals and Treatment. The following experimental groups are used for studying disease progression and lifespan:

1. Group 1—Mismatch siRNA—wild-type (n=10) and SOD1^{G93A} mice (n=10)
2. Group 2—siRNA of the present invention—wild-type (n=10) and SOD1^{G93A} mice (n=10)
3. Group 3—Untreated controls—wild-type (n=10) and SOD1^{G93A} mice (n=10)

[0516] Each experimental group is sex matched (5 male, 5 female) and contain littermates from at least 3 different litters. This design reduces bias that may be introduced by using mice from only a small number of litters, or groups of mice with a larger percentage of female SOD1^{G93A} mice (since these mice live 3-4 days longer than males).

[0517] Administration of siRNA. The route of administration of the siRNA is intranasal instillation, with administration twice weekly, starting from 30 days of age.

[0518] Analysis of disease progression. Behavioral and electromyography (EMG) analysis in treated and untreated mice is performed to monitor disease onset and progression. Mice are pre-tested before start of siRNA treatment, followed by weekly assessments. All results are compared statistically. The following tests are performed:

1. Swimming tank test: this test is particularly sensitive at detecting changes in hind-limb motor function (Raoul et al., 2005. Nat. Med. 11, 423-428; Towne et al, 2008. Mol. Ther. 16: 1018-1025).
2. Electromyography: EMG assessments are performed in the gastrocnemius muscle of the hind limbs, where compound muscle action potential (CMAP) is recorded (Raoul et al., 2005. supra).
3. Body weight: The body weight of mice is recorded weekly, as there is a significant reduction in the body weight of SOD1^{G93A} mice during disease progression (Kieran et al., 2007. PNAS USA. 104, 20606-20611).

[0519] Assessment of lifespan. The lifespan in days for treated and untreated mice is recorded and compared statistically to determine whether siRNA treatment has any significant effect on lifespan. Mice are sacrificed at a well-defined disease end point, when they have lost >20% of body weight and are unable to raise themselves in under 20 seconds. All results are compared statistically.

[0520] Post mortem histopathology. At the disease end-point mice are terminally anaesthetized and spinal cord and hind-limb muscle tissue are collected for histological and biochemical analysis.

[0521] Examining motor neuron survival. Transverse sections of lumbar spinal cord are cut using a cryostat and stained with gallocyanin, a nissl stain. From these sections the number of motor neurons in the lumbar spinal cord is counted (Kieran et al., 2007. supra), to determine whether siRNA treatment prevents motor neuron degeneration in SOD1^{G93A} mice.

[0522] Examining spinal cord histopathology. Motor neuron degeneration in SOD1^{G93A} mice results in astrogliosis and activation of microglial cells. Here, using transverse sections of lumbar spinal cord the activation of astrocytes and microglial cells is examined using immunocytochemistry to determine whether siRNA treatment reduced or prevented their activation.

[0523] Examining muscle histology. Hind-limb muscle denervation and atrophy occur as a consequence of motor neuron degeneration in SOD11^{G93A} mice. At the disease end point the weight of individual hind-limb muscles (gastrocnemius, soleus, tibialis anterior, extensor digitorium longus muscles) is recorded and compared between treated and untreated mice. Muscles are then processed histologically to examine motor end plate denervation and muscle atrophy (Kieran et al., 2005. J. Cell Biol. 169, 561-567).

[0524] For further elaboration on model systems which are used to test the compounds of the present invention, see International Patent Publication Nos. WO 06/023544A2, WO 2006/035434 and WO 2007/084684A2, co-assigned or assigned to the assignee of the present invention, which are hereby incorporated by reference in their entirety.

[0525] The siRNA compounds of the present invention are tested in the above animal models of neurodegenerative conditions, in which it is shown that RTP801 siRNA molecules ameliorate the symptoms of neurodegenerative diseases.

The application's sequence listing, which the Patent Office published only in electronic form, follows.

SEQUENCE LISTING (3556 sequences)

SEQ ID NO: 1 - DNA, 1782 bp, Artificial
  Oligomer
tttggccctcgaggccaagaattcggcacgagggggggaggtgcgagcgtggacctgggacgggtctgggcggctctcggtggttggcacgggttcgcacacccattcaagcggcaggacgcacttgtcttagcagttctcgctgaccgcgctagctgcggcttctacgctccggcactctgagttcatcagcaaacgccctggcgtctgtcctcaccatgcctagcctttgggaccgcttctcgtcgtcgtccacctcctcttcgccctcgtccttgccccgaactcccaccccagatcggccgccgcgctcagcctgggggtcggcgacccgggaggaggggtttgaccgctccacgagcctggagagctcggactgcgagtccctggacagcagcaacagtggcttcgggccggaggaagacacggcttacctggatggggtgtcgttgcccgacttcgagctgctcagtgaccctgaggatgaacacttgtgtgccaacctgatgcagctgctgcaggagagcctggcccaggcgcggctgggctctcgacgccctgcgcgcctgctgatgcctagccagttggtaagccaggtgggcaaagaactactgcgcctggcctacagcgagccgtgcggcctgcggggggcgctgctggacgtctgcgtggagcagggcaagagctgccacagcgtgggccagctggcactcgaccccagcctggtgcccaccttccagctgaccctcgtgctgcgcctggactcacgactctggcccaagatccaggggctgtttagctccgccaactctcccttcctccctggcttcagccagtccctgacgctgagcactggcttccgagtcatcaagaagaagctgtacagctcggaacagctgctcattgaggagtgttgaacttcaacctgagggggccgacagtgccctccaagacagagacgactgaacttttggggtggagactagaggcaggagctgagggactgattcctgtggttggaaaactgaggcagccacctaaggtggaggtgggggaatagtgtttcccaggaagctcattgagttgtgtgcgggtggctgtgcattggggacacatacccctcagtactgtagcatgaaacaaaggcttaggggccaacaaggcttccagctggatgtgtgtgtagcatgtaccttattatttttgttactgacagttaacagtggtgtgacatccagagagcagctgggctgctcccgccccagcccggcccagggtgaaggaagaggcacgtgctcctcagagcagccggagggaggggggaggtcggaggtcgtggaggtggtttgtgtatcttactggtctgaagggaccaagtgtgtttgttgtttgttttgtatcttgtttttctgatcggagcatcactactgacctgttgtaggcagctatcttacagacgcatgaatgtaagagtaggaaggggtgggtgtcagggatcacttgggatctttgacacttgaaaaattacacctggcagctgcgtttaagccttcccccatcgtgtactgcagagttgagctggcaggggaggggctgagagggtgggggctggaacccctccccgggaggagtgccatctgggtcttccatctagaactgtttacatgaagataagatactcactgttcatgaatacacttgatgttcaagtattaagacctatgcaatattttttacttttctaataaacatgtttgttaaaacaaaaaaaaaaaaaaaaaa

SEQ ID NO: 2 - protein, 232 aa, Homo sapiens
MPSLWDRFSSSSTSSSPSSLPRTPTPDRPPRSAWGSATREEGFDRSTSLESSDCESLDSSNSGFGPEEDTAYLDGVSLPDFELLSDPEDEHLCANLMQLLQESLAQARLGSRRPARLLMPSQLVSQVGKELLRLAYSEPCGLRGALLDVCVEQGKSCHSVGQLALDPSLVPTFQLTLVLRLDSRLWPKIQGLFSSANSPFLPGFSQSLTLSTGFRVIKKKLYSSEQLLIEEC

SEQ ID NO: 3 - RNA, 19 nt, artificial
  Oligomer
gcgcuagcugcggcuucua

SEQ ID NO: 4 - RNA, 19 nt, artificial
  Oligomer
cgagccuggagagcucgga

SEQ ID NO: 5 - RNA, 19 nt, artificial
  Oligomer
gagucccuggacagcagca

SEQ ID NO: 6 - RNA, 19 nt, artificial
  Oligomer
ccaaccugaugcagcugcu

SEQ ID NO: 7 - RNA, 19 nt, artificial
  Oligomer
cgugcugcgccuggacuca

SEQ ID NO: 8 - RNA, 19 nt, artificial
  Oligomer
ucgcugaccgcgcuagcug

SEQ ID NO: 9 - RNA, 19 nt, artificial
  Oligomer
cugaccgcgcuagcugcgg

SEQ ID NO: 10 - RNA, 19 nt, artificial
  Oligomer
accgcgcuagcugcggcuu

SEQ ID NO: 11 - RNA, 19 nt, artificial
  Oligomer
agccuggagagcucggacu

SEQ ID NO: 12 - RNA, 19 nt, artificial
  Oligomer
ccuggagagcucggacugc

SEQ ID NO: 13 - RNA, 19 nt, artificial
  Oligomer
ucccuggacagcagcaaca

SEQ ID NO: 14 - RNA, 19 nt, artificial
  Oligomer
gacagcagcaacaguggcu

SEQ ID NO: 15 - RNA, 19 nt, artificial
  Oligomer
acagcagcaacaguggcuu

SEQ ID NO: 16 - RNA, 19 nt, artificial
  Oligomer
gugccaaccugaugcagcu

SEQ ID NO: 17 - RNA, 19 nt, artificial
  Oligomer
accugaugcagcugcugca

SEQ ID NO: 18 - RNA, 19 nt, artificial
  Oligomer
augcagcugcugcaggaga

SEQ ID NO: 19 - RNA, 19 nt, artificial
  Oligomer
agccgugcggccugcgggg

SEQ ID NO: 20 - RNA, 19 nt, artificial
  Oligomer
cucuggcccaagauccagg

SEQ ID NO: 21 - RNA, 19 nt, artificial
  Oligomer
cagccagucccugacgcug

SEQ ID NO: 22 - RNA, 19 nt, artificial
  Oligomer
ccccucaguacuguagcau

SEQ ID NO: 23 - RNA, 19 nt, artificial
  Oligomer
aggcagcuaucuuacagac

SEQ ID NO: 24 - RNA, 19 nt, artificial
  Oligomer
cugggucuuccaucuagaa

SEQ ID NO: 25 - RNA, 19 nt, artificial
  Oligomer
gaauacacuugauguucaa

SEQ ID NO: 26 - RNA, 19 nt, artificial
  Oligomer
uaagaccuaugcaauauuu

SEQ ID NO: 27 - RNA, 19 nt, artificial
  Oligomer
agaccuaugcaauauuuuu

SEQ ID NO: 28 - RNA, 19 nt, artificial
  Oligomer
gcucggacugcgagucccu

SEQ ID NO: 29 - RNA, 19 nt, artificial
  Oligomer
uacacuugauguucaagua

SEQ ID NO: 30 - RNA, 19 nt, artificial
  Oligomer
uuuucuaauaaacauguuu

SEQ ID NO: 31 - RNA, 19 nt, artificial
  Oligomer
cgcacuugucuuagcaguu

SEQ ID NO: 32 - RNA, 19 nt, artificial
  Oligomer
gaccgcuucucgucgucgu

SEQ ID NO: 33 - RNA, 19 nt, artificial
  Oligomer
ccggaggaagacacggcuu

SEQ ID NO: 34 - RNA, 19 nt, artificial
  Oligomer
gacccugaggaugaacacu

SEQ ID NO: 35 - RNA, 19 nt, artificial
  Oligomer
gcugggcucucgacgcccu

SEQ ID NO: 36 - RNA, 19 nt, artificial
  Oligomer
gcccugcgcgccugcugau

SEQ ID NO: 37 - RNA, 19 nt, artificial
  Oligomer
gccaggugggcaaagaacu

SEQ ID NO: 38 - RNA, 19 nt, artificial
  Oligomer
cuggccuacagcgagccgu

SEQ ID NO: 39 - RNA, 19 nt, artificial
  Oligomer
ggggggcgcugcuggacgu

SEQ ID NO: 40 - RNA, 19 nt, artificial
  Oligomer
gcacuggcuuccgagucau

SEQ ID NO: 41 - RNA, 19 nt, artificial
  Oligomer
ccaggaagcucauugaguu

SEQ ID NO: 42 - RNA, 19 nt, artificial
  Oligomer
cguguacugcagaguugag

SEQ ID NO: 43 - RNA, 19 nt, artificial
  Oligomer
ggaggugguuuguguaucu

SEQ ID NO: 44 - RNA, 19 nt, artificial
  Oligomer
gaccaaguguguuuguugu

SEQ ID NO: 45 - RNA, 19 nt, artificial
  Oligomer
gugugccaaccugaugcag

SEQ ID NO: 46 - RNA, 19 nt, artificial
  Oligomer
guggagacuagaggcagga

SEQ ID NO: 47 - RNA, 19 nt, artificial
  Oligomer
ugccaaccugaugcagcug

SEQ ID NO: 48 - RNA, 19 nt, artificial
  Oligomer
caaccugaugcagcugcug

SEQ ID NO: 49 - RNA, 19 nt, artificial
  Oligomer
cugaugcagcugcugcagg

SEQ ID NO: 50 - RNA, 19 nt, artificial
  Oligomer
gaugcagcugcugcaggag

SEQ ID NO: 51 - RNA, 19 nt, artificial
  Oligomer
caucguguacugcagaguu

SEQ ID NO: 52 - RNA, 19 nt, artificial
  Oligomer
gguggagacuagaggcagg

SEQ ID NO: 53 - RNA, 19 nt, artificial
  Oligomer
uagaagccgcagcuagcgc

SEQ ID NO: 54 - RNA, 19 nt, artificial
  Oligomer
uccgagcucuccaggcucg

SEQ ID NO: 55 - RNA, 19 nt, artificial
  Oligomer
ugcugcuguccagggacuc

SEQ ID NO: 56 - RNA, 19 nt, artificial
  Oligomer
agcagcugcaucagguugg

SEQ ID NO: 57 - RNA, 19 nt, artificial
  Oligomer
ugaguccaggcgcagcacg

SEQ ID NO: 58 - RNA, 19 nt, artificial
  Oligomer
cagcuagcgcggucagcga

SEQ ID NO: 59 - RNA, 19 nt, artificial
  Oligomer
ccgcagcuagcgcggucag

SEQ ID NO: 60 - RNA, 19 nt, artificial
  Oligomer
aagccgcagcuagcgcggu

SEQ ID NO: 61 - RNA, 19 nt, artificial
  Oligomer
aguccgagcucuccaggcu

SEQ ID NO: 62 - RNA, 19 nt, artificial
  Oligomer
gcaguccgagcucuccagg

SEQ ID NO: 63 - RNA, 19 nt, artificial
  Oligomer
uguugcugcuguccaggga

SEQ ID NO: 64 - RNA, 19 nt, artificial
  Oligomer
agccacuguugcugcuguc

SEQ ID NO: 65 - RNA, 19 nt, artificial
  Oligomer
aagccacuguugcugcugu

SEQ ID NO: 66 - RNA, 19 nt, artificial
  Oligomer
agcugcaucagguuggcac

SEQ ID NO: 67 - RNA, 19 nt, artificial
  Oligomer
ugcagcagcugcaucaggu

SEQ ID NO: 68 - RNA, 19 nt, artificial
  Oligomer
ucuccugcagcagcugcau

SEQ ID NO: 69 - RNA, 19 nt, artificial
  Oligomer
ccccgcaggccgcacggcu

SEQ ID NO: 70 - RNA, 19 nt, artificial
  Oligomer
ccuggaucuugggccagag

SEQ ID NO: 71 - RNA, 19 nt, artificial
  Oligomer
cagcgucagggacuggcug

SEQ ID NO: 72 - RNA, 19 nt, artificial
  Oligomer
augcuacaguacugagggg

SEQ ID NO: 73 - RNA, 19 nt, artificial
  Oligomer
gucuguaagauagcugccu

SEQ ID NO: 74 - RNA, 19 nt, artificial
  Oligomer
uucuagauggaagacccag

SEQ ID NO: 75 - RNA, 19 nt, artificial
  Oligomer
uugaacaucaaguguauuc

SEQ ID NO: 76 - RNA, 19 nt, artificial
  Oligomer
aaauauugcauaggucuua

SEQ ID NO: 77 - RNA, 19 nt, artificial
  Oligomer
aaaaauauugcauaggucu

SEQ ID NO: 78 - RNA, 19 nt, artificial
  Oligomer
agggacucgcaguccgagc

SEQ ID NO: 79 - RNA, 19 nt, artificial
  Oligomer
uacuugaacaucaagugua

SEQ ID NO: 80 - RNA, 19 nt, artificial
  Oligomer
aaacauguuuauuagaaaa

SEQ ID NO: 81 - RNA, 19 nt, artificial
  Oligomer
aacugcuaagacaagugcg

SEQ ID NO: 82 - RNA, 19 nt, artificial
  Oligomer
acgacgacgagaagcgguc

SEQ ID NO: 83 - RNA, 19 nt, artificial
  Oligomer
aagccgugucuuccuccgg

SEQ ID NO: 84 - RNA, 19 nt, artificial
  Oligomer
aguguucauccucaggguc

SEQ ID NO: 85 - RNA, 19 nt, artificial
  Oligomer
agggcgucgagagcccagc

SEQ ID NO: 86 - RNA, 19 nt, artificial
  Oligomer
aucagcaggcgcgcagggc

SEQ ID NO: 87 - RNA, 19 nt, artificial
  Oligomer
aguucuuugcccaccuggc

SEQ ID NO: 88 - RNA, 19 nt, artificial
  Oligomer
acggcucgcuguaggccag

SEQ ID NO: 89 - RNA, 19 nt, artificial
  Oligomer
acguccagcagcgcccccc

SEQ ID NO: 90 - RNA, 19 nt, artificial
  Oligomer
augacucggaagccagugc

SEQ ID NO: 91 - RNA, 19 nt, artificial
  Oligomer
aacucaaugagcuuccugg

SEQ ID NO: 92 - RNA, 19 nt, artificial
  Oligomer
cucaacucugcaguacacg

SEQ ID NO: 93 - RNA, 19 nt, artificial
  Oligomer
agauacacaaaccaccucc

SEQ ID NO: 94 - RNA, 19 nt, artificial
  Oligomer
acaacaaacacacuugguc

SEQ ID NO: 95 - RNA, 19 nt, artificial
  Oligomer
cugcaucagguuggcacac

SEQ ID NO: 96 - RNA, 19 nt, artificial
  Oligomer
uccugccucuagucuccac

SEQ ID NO: 97 - RNA, 19 nt, artificial
  Oligomer
cagcugcaucagguuggca

SEQ ID NO: 98 - RNA, 19 nt, artificial
  Oligomer
cagcagcugcaucagguug

SEQ ID NO: 99 - RNA, 19 nt, artificial
  Oligomer
ccugcagcagcugcaucag

SEQ ID NO: 100 - RNA, 19 nt, artificial
  Oligomer
cuccugcagcagcugcauc

SEQ ID NO: 101 - RNA, 19 nt, artificial
  Oligomer
aacucugcaguacacgaug

SEQ ID NO: 102 - RNA, 19 nt, artificial
  Oligomer
ccugccucuagucuccacc

SEQ ID NO: 103 - RNA, 19 nt, artificial
  Oligomer
cuagccaguugguaagcca

SEQ ID NO: 104 - RNA, 19 nt, artificial
  Oligomer
ugauuccagugguuggaaa

SEQ ID NO: 105 - RNA, 19 nt, artificial
  Oligomer
ccagugguuggaaaacuga

SEQ ID NO: 106 - RNA, 19 nt, artificial
  Oligomer
gcuuccgagucaucaagaa

SEQ ID NO: 107 - RNA, 19 nt, artificial
  Oligomer
ggaagcucauugaguugug

SEQ ID NO: 108 - RNA, 19 nt, artificial
  Oligomer
ccaucugggucuuccaucu

SEQ ID NO: 109 - RNA, 19 nt, artificial
  Oligomer
ggauguguguguagcaugu

SEQ ID NO: 110 - RNA, 19 nt, artificial
  Oligomer
acacauaccccucaguacu

SEQ ID NO: 111 - RNA, 19 nt, artificial
  Oligomer
acauaccccucaguacugu

SEQ ID NO: 112 - RNA, 19 nt, artificial
  Oligomer
cacuguucaugaauacacu

SEQ ID NO: 113 - RNA, 19 nt, artificial
  Oligomer
ccagcuggaugugugugua

SEQ ID NO: 114 - RNA, 19 nt, artificial
  Oligomer
cggaacagcugcucauuga

SEQ ID NO: 115 - RNA, 19 nt, artificial
  Oligomer
gaagcucauugaguugugu

SEQ ID NO: 116 - RNA, 19 nt, artificial
  Oligomer
ggacacauaccccucagua

SEQ ID NO: 117 - RNA, 19 nt, artificial
  Oligomer
ggaucuuugacacuugaaa

SEQ ID NO: 118 - RNA, 19 nt, artificial
  Oligomer
guagcauguaccuuauuau

SEQ ID NO: 119 - RNA, 19 nt, artificial
  Oligomer
ucaguacuguagcauggaa

SEQ ID NO: 120 - RNA, 19 nt, artificial
  Oligomer
uguguagcauguaccuuau

SEQ ID NO: 121 - RNA, 19 nt, artificial
  Oligomer
cuggauguguguguagcau

SEQ ID NO: 122 - RNA, 19 nt, artificial
  Oligomer
acacuugauguucaaguau

SEQ ID NO: 123 - RNA, 19 nt, artificial
  Oligomer
gcaugaauguaagaguagg

SEQ ID NO: 124 - RNA, 19 nt, artificial
  Oligomer
agcagcaacaguggcuucg

SEQ ID NO: 125 - RNA, 19 nt, artificial
  Oligomer
augaauguaagaguaggaa

SEQ ID NO: 126 - RNA, 19 nt, artificial
  Oligomer
cagcagcaacaguggcuuc

SEQ ID NO: 127 - RNA, 19 nt, artificial
  Oligomer
caugaauguaagaguagga

SEQ ID NO: 128 - RNA, 19 nt, artificial
  Oligomer
gauguucaaguauuaagac

SEQ ID NO: 129 - RNA, 19 nt, artificial
  Oligomer
ugaugcagcugcugcagga

SEQ ID NO: 130 - RNA, 19 nt, artificial
  Oligomer
gaauacacuugauguucaa

SEQ ID NO: 131 - RNA, 19 nt, artificial
  Oligomer
ugaauacacuugauguuca

SEQ ID NO: 132 - RNA, 19 nt, artificial
  Oligomer
auacacuugauguucaagu

SEQ ID NO: 133 - RNA, 19 nt, artificial
  Oligomer
caugaauacacuugauguu

SEQ ID NO: 134 - RNA, 19 nt, artificial
  Oligomer
cuggacagcagcaacagug

SEQ ID NO: 135 - RNA, 19 nt, artificial
  Oligomer
guucaugaauacacuugau

SEQ ID NO: 136 - RNA, 19 nt, artificial
  Oligomer
ucaugaauacacuugaugu

SEQ ID NO: 137 - RNA, 19 nt, artificial
  Oligomer
uggacagcagcaacagugg

SEQ ID NO: 138 - RNA, 19 nt, artificial
  Oligomer
ugugugccaaccugaugca

SEQ ID NO: 139 - RNA, 19 nt, artificial
  Oligomer
uucaugaauacacuugaug

SEQ ID NO: 140 - RNA, 19 nt, artificial
  Oligomer
aaccugaugcagcugcugc

SEQ ID NO: 141 - RNA, 19 nt, artificial
  Oligomer
agucccuggacagcagcaa

SEQ ID NO: 142 - RNA, 19 nt, artificial
  Oligomer
cccucaguacuguagcaug

SEQ ID NO: 143 - RNA, 19 nt, artificial
  Oligomer
ccuggacagcagcaacagu

SEQ ID NO: 144 - RNA, 19 nt, artificial
  Oligomer
ugugccaaccugaugcagc

SEQ ID NO: 145 - RNA, 19 nt, artificial
  Oligomer
aauacacuugauguucaag

SEQ ID NO: 146 - RNA, 19 nt, artificial
  Oligomer
augaauacacuugauguuc

SEQ ID NO: 147 - RNA, 19 nt, artificial
  Oligomer
ugaugcagcugcugcagga

SEQ ID NO: 148 - RNA, 19 nt, artificial
  Oligomer
agaacuguuuacaugaaga

SEQ ID NO: 149 - RNA, 19 nt, artificial
  Oligomer
aucuagaacuguuuacaug

SEQ ID NO: 150 - RNA, 19 nt, artificial
  Oligomer
ccaugccuagccuuuggga

SEQ ID NO: 151 - RNA, 19 nt, artificial
  Oligomer
cuagaacuguuuacaugaa

SEQ ID NO: 152 - RNA, 19 nt, artificial
  Oligomer
gaacuguuuacaugaagau

SEQ ID NO: 153 - RNA, 19 nt, artificial
  Oligomer
ggucuuccaucuagaacug

SEQ ID NO: 154 - RNA, 19 nt, artificial
  Oligomer
ccaucuagaacuguuuaca

SEQ ID NO: 155 - RNA, 19 nt, artificial
  Oligomer
cuuccaucuagaacuguuu

SEQ ID NO: 156 - RNA, 19 nt, artificial
  Oligomer
uagaacuguuuacaugaag

SEQ ID NO: 157 - RNA, 19 nt, artificial
  Oligomer
ucuuccaucuagaacuguu

SEQ ID NO: 158 - RNA, 19 nt, artificial
  Oligomer
caucuagaacuguuuacau

SEQ ID NO: 159 - RNA, 19 nt, artificial
  Oligomer
gggucuuccaucuagaacu

SEQ ID NO: 160 - RNA, 19 nt, artificial
  Oligomer
uccaucuagaacuguuuac

SEQ ID NO: 161 - RNA, 19 nt, artificial
  Oligomer
ucuagaacuguuuacauga

SEQ ID NO: 162 - RNA, 19 nt, artificial
  Oligomer
uuccaucuagaacuguuua

SEQ ID NO: 163 - RNA, 19 nt, artificial
  Oligomer
gucuuccaucuagaacugu

SEQ ID NO: 164 - RNA, 19 nt, artificial
  Oligomer
caaguauuaagaccuaugc

SEQ ID NO: 165 - RNA, 19 nt, artificial
  Oligomer
guauuaagaccuaugcaau

SEQ ID NO: 166 - RNA, 19 nt, artificial
  Oligomer
aguauuaagaccuaugcaa

SEQ ID NO: 167 - RNA, 19 nt, artificial
  Oligomer
auguucaaguauuaagacc

SEQ ID NO: 168 - RNA, 19 nt, artificial
  Oligomer
cacuugauguucaaguauu

SEQ ID NO: 169 - RNA, 19 nt, artificial
  Oligomer
ccaagauccaggggcuguu

SEQ ID NO: 170 - RNA, 19 nt, artificial
  Oligomer
guucaaguauuaagaccua

SEQ ID NO: 171 - RNA, 19 nt, artificial
  Oligomer
ucaaguauuaagaccuaug

SEQ ID NO: 172 - RNA, 19 nt, artificial
  Oligomer
aaguauuaagaccuaugca

SEQ ID NO: 173 - RNA, 19 nt, artificial
  Oligomer
uguucaaguauuaagaccu

SEQ ID NO: 174 - RNA, 19 nt, artificial
  Oligomer
ugggucuuccaucuagaac

SEQ ID NO: 175 - RNA, 19 nt, artificial
  Oligomer
uggcuuaccaacuggcuag

SEQ ID NO: 176 - RNA, 19 nt, artificial
  Oligomer
uuuccaaccacuggaauca

SEQ ID NO: 177 - RNA, 19 nt, artificial
  Oligomer
ucaguuuuccaaccacugg

SEQ ID NO: 178 - RNA, 19 nt, artificial
  Oligomer
uucuugaugacucggaagc

SEQ ID NO: 179 - RNA, 19 nt, artificial
  Oligomer
cacaacucaaugagcuucc

SEQ ID NO: 180 - RNA, 19 nt, artificial
  Oligomer
agauggaagacccagaugg

SEQ ID NO: 181 - RNA, 19 nt, artificial
  Oligomer
acaugcuacacacacaucc

SEQ ID NO: 182 - RNA, 19 nt, artificial
  Oligomer
aguacugagggguaugugu

SEQ ID NO: 183 - RNA, 19 nt, artificial
  Oligomer
acaguacugagggguaugu

SEQ ID NO: 184 - RNA, 19 nt, artificial
  Oligomer
aguguauucaugaacagug

SEQ ID NO: 185 - RNA, 19 nt, artificial
  Oligomer
uacacacacauccagcugg

SEQ ID NO: 186 - RNA, 19 nt, artificial
  Oligomer
ucaaugagcagcuguuccg

SEQ ID NO: 187 - RNA, 19 nt, artificial
  Oligomer
acacaacucaaugagcuuc

SEQ ID NO: 188 - RNA, 19 nt, artificial
  Oligomer
uacugagggguaugugucc

SEQ ID NO: 189 - RNA, 19 nt, artificial
  Oligomer
uuucaagugucaaagaucc

SEQ ID NO: 190 - RNA, 19 nt, artificial
  Oligomer
auaauaagguacaugcuac

SEQ ID NO: 191 - RNA, 19 nt, artificial
  Oligomer
uuccaugcuacaguacuga

SEQ ID NO: 192 - RNA, 19 nt, artificial
  Oligomer
auaagguacaugcuacaca

SEQ ID NO: 193 - RNA, 19 nt, artificial
  Oligomer
augcuacacacacauccag

SEQ ID NO: 194 - RNA, 19 nt, artificial
  Oligomer
auacuugaacaucaagugu

SEQ ID NO: 195 - RNA, 19 nt, artificial
  Oligomer
ccuacucuuacauucaugc

SEQ ID NO: 196 - RNA, 19 nt, artificial
  Oligomer
cgaagccacuguugcugcu

SEQ ID NO: 197 - RNA, 19 nt, artificial
  Oligomer
uuccuacucuuacauucau

SEQ ID NO: 198 - RNA, 19 nt, artificial
  Oligomer
gaagccacuguugcugcug

SEQ ID NO: 199 - RNA, 19 nt, artificial
  Oligomer
uccuacucuuacauucaug

SEQ ID NO: 200 - RNA, 19 nt, artificial
  Oligomer
gucuuaauacuugaacauc

SEQ ID NO: 201 - RNA, 19 nt, artificial
  Oligomer
uccugcagcagcugcauca

SEQ ID NO: 202 - RNA, 19 nt, artificial
  Oligomer
uugaacaucaaguguauuc

SEQ ID NO: 203 - RNA, 19 nt, artificial
  Oligomer
ugaacaucaaguguauuca

SEQ ID NO: 204 - RNA, 19 nt, artificial
  Oligomer
acuugaacaucaaguguau

SEQ ID NO: 205 - RNA, 19 nt, artificial
  Oligomer
aacaucaaguguauucaug

SEQ ID NO: 206 - RNA, 19 nt, artificial
  Oligomer
cacuguugcugcuguccag

SEQ ID NO: 207 - RNA, 19 nt, artificial
  Oligomer
aucaaguguauucaugaac

SEQ ID NO: 208 - RNA, 19 nt, artificial
  Oligomer
acaucaaguguauucauga

SEQ ID NO: 209 - RNA, 19 nt, artificial
  Oligomer
ccacuguugcugcugucca

SEQ ID NO: 210 - RNA, 19 nt, artificial
  Oligomer
ugcaucagguuggcacaca

SEQ ID NO: 211 - RNA, 19 nt, artificial
  Oligomer
caucaaguguauucaugaa

SEQ ID NO: 212 - RNA, 19 nt, artificial
  Oligomer
gcagcagcugcaucagguu

SEQ ID NO: 213 - RNA, 19 nt, artificial
  Oligomer
uugcugcuguccagggacu

SEQ ID NO: 214 - RNA, 19 nt, artificial
  Oligomer
caugcuacaguacugaggg

SEQ ID NO: 215 - RNA, 19 nt, artificial
  Oligomer
acuguugcugcuguccagg

SEQ ID NO: 216 - RNA, 19 nt, artificial
  Oligomer
gcugcaucagguuggcaca

SEQ ID NO: 217 - RNA, 19 nt, artificial
  Oligomer
cuugaacaucaaguguauu

SEQ ID NO: 218 - RNA, 19 nt, artificial
  Oligomer
gaacaucaaguguauucau

SEQ ID NO: 219 - RNA, 19 nt, artificial
  Oligomer
uccugcagcagcugcauca

SEQ ID NO: 220 - RNA, 19 nt, artificial
  Oligomer
ucuucauguaaacaguucu

SEQ ID NO: 221 - RNA, 19 nt, artificial
  Oligomer
cauguaaacaguucuagau

SEQ ID NO: 222 - RNA, 19 nt, artificial
  Oligomer
ucccaaaggcuaggcaugg

SEQ ID NO: 223 - RNA, 19 nt, artificial
  Oligomer
uucauguaaacaguucuag

SEQ ID NO: 224 - RNA, 19 nt, artificial
  Oligomer
aucuucauguaaacaguuc

SEQ ID NO: 225 - RNA, 19 nt, artificial
  Oligomer
caguucuagauggaagacc

SEQ ID NO: 226 - RNA, 19 nt, artificial
  Oligomer
uguaaacaguucuagaugg

SEQ ID NO: 227 - RNA, 19 nt, artificial
  Oligomer
aaacaguucuagauggaag

SEQ ID NO: 228 - RNA, 19 nt, artificial
  Oligomer
cuucauguaaacaguucua

SEQ ID NO: 229 - RNA, 19 nt, artificial
  Oligomer
aacaguucuagauggaaga

SEQ ID NO: 230 - RNA, 19 nt, artificial
  Oligomer
auguaaacaguucuagaug

SEQ ID NO: 231 - RNA, 19 nt, artificial
  Oligomer
aguucuagauggaagaccc

SEQ ID NO: 232 - RNA, 19 nt, artificial
  Oligomer
guaaacaguucuagaugga

SEQ ID NO: 233 - RNA, 19 nt, artificial
  Oligomer
ucauguaaacaguucuaga

SEQ ID NO: 234 - RNA, 19 nt, artificial
  Oligomer
uaaacaguucuagauggaa

SEQ ID NO: 235 - RNA, 19 nt, artificial
  Oligomer
acaguucuagauggaagac

SEQ ID NO: 236 - RNA, 19 nt, artificial
  Oligomer
gcauaggucuuaauacuug

SEQ ID NO: 237 - RNA, 19 nt, artificial
  Oligomer
auugcauaggucuuaauac

SEQ ID NO: 238 - RNA, 19 nt, artificial
  Oligomer
uugcauaggucuuaauacu

SEQ ID NO: 239 - RNA, 19 nt, artificial
  Oligomer
ggucuuaauacuugaacau

SEQ ID NO: 240 - RNA, 19 nt, artificial
  Oligomer
aauacuugaacaucaagug

SEQ ID NO: 241 - RNA, 19 nt, artificial
  Oligomer
aacagccccuggaucuugg

SEQ ID NO: 242 - RNA, 19 nt, artificial
  Oligomer
uaggucuuaauacuugaac

SEQ ID NO: 243 - RNA, 19 nt, artificial
  Oligomer
cauaggucuuaauacuuga

SEQ ID NO: 244 - RNA, 19 nt, artificial
  Oligomer
ugcauaggucuuaauacuu

SEQ ID NO: 245 - RNA, 19 nt, artificial
  Oligomer
aggucuuaauacuugaaca

SEQ ID NO: 246 - RNA, 19 nt, artificial
  Oligomer
guucuagauggaagaccca

SEQ ID NO: 247 - RNA, 21 nt, artificial
  Oligomer
ccaggaagcucauugaguugu

SEQ ID NO: 248 - RNA, 21 nt, artificial
  Oligomer
ccaucugggucuuccaucuag

SEQ ID NO: 249 - RNA, 21 nt, artificial
  Oligomer
ggauguguguguagcauguac

SEQ ID NO: 250 - RNA, 21 nt, artificial
  Oligomer
caaguguguuuguuguuuguu

SEQ ID NO: 251 - RNA, 21 nt, artificial
  Oligomer
ccucaguacuguagcauggaa

SEQ ID NO: 252 - RNA, 21 nt, artificial
  Oligomer
gaccaaguguguuuguuguuu

SEQ ID NO: 253 - RNA, 21 nt, artificial
  Oligomer
gcuuccgagucaucaagaaga

SEQ ID NO: 254 - RNA, 21 nt, artificial
  Oligomer
ggaggugggggaauaguguuu

SEQ ID NO: 255 - RNA, 21 nt, artificial
  Oligomer
caguacuguagcauggaacaa

SEQ ID NO: 256 - RNA, 21 nt, artificial
  Oligomer
gaauacacuugauguucaagu

SEQ ID NO: 257 - RNA, 21 nt, artificial
  Oligomer
caaguauuaagaccuaugcaa

SEQ ID NO: 258 - RNA, 21 nt, artificial
  Oligomer
gaacuuuugggguggagacua

SEQ ID NO: 259 - RNA, 21 nt, artificial
  Oligomer
ggacacauaccccucaguacu

SEQ ID NO: 260 - RNA, 21 nt, artificial
  Oligomer
ggaggugguuuguguaucuua

SEQ ID NO: 261 - RNA, 21 nt, artificial
  Oligomer
ggaucuuugacacuugaaaaa

SEQ ID NO: 262 - RNA, 21 nt, artificial
  Oligomer
ggucuuccaucuagaacuguu

SEQ ID NO: 263 - RNA, 21 nt, artificial
  Oligomer
uguguagcauguaccuuauua

SEQ ID NO: 264 - RNA, 21 nt, artificial
  Oligomer
caacaaggcuuccagcuggau

SEQ ID NO: 265 - RNA, 21 nt, artificial
  Oligomer
cacuugggaucuuugacacuu

SEQ ID NO: 266 - RNA, 21 nt, artificial
  Oligomer
caucacuacugaccuguugua

SEQ ID NO: 267 - RNA, 21 nt, artificial
  Oligomer
guguguguagcauguaccuua

SEQ ID NO: 268 - RNA, 21 nt, artificial
  Oligomer
gcaugaauguaagaguaggaa

SEQ ID NO: 269 - RNA, 21 nt, artificial
  Oligomer
gacagcagcaacaguggcuuc

SEQ ID NO: 270 - RNA, 21 nt, artificial
  Oligomer
ugaugcagcugcugcaggaga

SEQ ID NO: 271 - RNA, 21 nt, artificial
  Oligomer
ugaauacacuugauguucaag

SEQ ID NO: 272 - RNA, 21 nt, artificial
  Oligomer
caugaauacacuugauguuca

SEQ ID NO: 273 - RNA, 21 nt, artificial
  Oligomer
ggacagcagcaacaguggcuu

SEQ ID NO: 274 - RNA, 21 nt, artificial
  Oligomer
guucaugaauacacuugaugu

SEQ ID NO: 275 - RNA, 21 nt, artificial
  Oligomer
ucaugaauacacuugauguuc

SEQ ID NO: 276 - RNA, 21 nt, artificial
  Oligomer
ucccuggacagcagcaacagu

SEQ ID NO: 277 - RNA, 21 nt, artificial
  Oligomer
agucccuggacagcagcaaca

SEQ ID NO: 278 - RNA, 21 nt, artificial
  Oligomer
gaauacacuugauguucaagu

SEQ ID NO: 279 - RNA, 21 nt, artificial
  Oligomer
cuagaacuguuuacaugaaga

SEQ ID NO: 280 - RNA, 21 nt, artificial
  Oligomer
ccaucuagaacuguuuacaug

SEQ ID NO: 281 - RNA, 21 nt, artificial
  Oligomer
cuuccaucuagaacuguuuac

SEQ ID NO: 282 - RNA, 21 nt, artificial
  Oligomer
ucuuccaucuagaacuguuua

SEQ ID NO: 283 - RNA, 21 nt, artificial
  Oligomer
caucuagaacuguuuacauga

SEQ ID NO: 284 - RNA, 21 nt, artificial
  Oligomer
gggucuuccaucuagaacugu

SEQ ID NO: 285 - RNA, 21 nt, artificial
  Oligomer
uccaucuagaacuguuuacau

SEQ ID NO: 286 - RNA, 21 nt, artificial
  Oligomer
ucuagaacuguuuacaugaag

SEQ ID NO: 287 - RNA, 21 nt, artificial
  Oligomer
uuccaucuagaacuguuuaca

SEQ ID NO: 288 - RNA, 21 nt, artificial
  Oligomer
gucuuccaucuagaacuguuu

SEQ ID NO: 289 - RNA, 21 nt, artificial
  Oligomer
ugauguucaaguauuaagacc

SEQ ID NO: 290 - RNA, 21 nt, artificial
  Oligomer
guucaaguauuaagaccuaug

SEQ ID NO: 291 - RNA, 21 nt, artificial
  Oligomer
ucaaguauuaagaccuaugca

SEQ ID NO: 292 - RNA, 21 nt, artificial
  Oligomer
gauguucaaguauuaagaccu

SEQ ID NO: 293 - RNA, 21 nt, artificial
  Oligomer
uucaaguauuaagaccuaugc

SEQ ID NO: 294 - RNA, 21 nt, artificial
  Oligomer
cugggucuuccaucuagaacu

SEQ ID NO: 295 - RNA, 21 nt, artificial
  Oligomer
ugggucuuccaucuagaacug

SEQ ID NO: 296 - RNA, 21 nt, artificial
  Oligomer
acaacucaaugagcuuccugg

SEQ ID NO: 297 - RNA, 21 nt, artificial
  Oligomer
cuagauggaagacccagaugg

SEQ ID NO: 298 - RNA, 21 nt, artificial
  Oligomer
guacaugcuacacacacaucc

SEQ ID NO: 299 - RNA, 21 nt, artificial
  Oligomer
aacaaacaacaaacacacuug

SEQ ID NO: 300 - RNA, 21 nt, artificial
  Oligomer
uuccaugcuacaguacugagg

SEQ ID NO: 301 - RNA, 21 nt, artificial
  Oligomer
aaacaacaaacacacuugguc

SEQ ID NO: 302 - RNA, 21 nt, artificial
  Oligomer
ucuucuugaugacucggaagc

SEQ ID NO: 303 - RNA, 21 nt, artificial
  Oligomer
aaacacuauucccccaccucc

SEQ ID NO: 304 - RNA, 21 nt, artificial
  Oligomer
uuguuccaugcuacaguacug

SEQ ID NO: 305 - RNA, 21 nt, artificial
  Oligomer
acuugaacaucaaguguauuc

SEQ ID NO: 306 - RNA, 21 nt, artificial
  Oligomer
uugcauaggucuuaauacuug

SEQ ID NO: 307 - RNA, 21 nt, artificial
  Oligomer
uagucuccaccccaaaaguuc

SEQ ID NO: 308 - RNA, 21 nt, artificial
  Oligomer
aguacugagggguaugugucc

SEQ ID NO: 309 - RNA, 21 nt, artificial
  Oligomer
uaagauacacaaaccaccucc

SEQ ID NO: 310 - RNA, 21 nt, artificial
  Oligomer
uuuuucaagugucaaagaucc

SEQ ID NO: 311 - RNA, 21 nt, artificial
  Oligomer
aacaguucuagauggaagacc

SEQ ID NO: 312 - RNA, 21 nt, artificial
  Oligomer
uaauaagguacaugcuacaca

SEQ ID NO: 313 - RNA, 21 nt, artificial
  Oligomer
auccagcuggaagccuuguug

SEQ ID NO: 314 - RNA, 21 nt, artificial
  Oligomer
aagugucaaagaucccaagug

SEQ ID NO: 315 - RNA, 21 nt, artificial
  Oligomer
uacaacaggucaguagugaug

SEQ ID NO: 316 - RNA, 21 nt, artificial
  Oligomer
uaagguacaugcuacacacac

SEQ ID NO: 317 - RNA, 21 nt, artificial
  Oligomer
uuccuacucuuacauucaugc

SEQ ID NO: 318 - RNA, 21 nt, artificial
  Oligomer
gaagccacuguugcugcuguc

SEQ ID NO: 319 - RNA, 21 nt, artificial
  Oligomer
ucuccugcagcagcugcauca

SEQ ID NO: 320 - RNA, 21 nt, artificial
  Oligomer
cuugaacaucaaguguauuca

SEQ ID NO: 321 - RNA, 21 nt, artificial
  Oligomer
ugaacaucaaguguauucaug

SEQ ID NO: 322 - RNA, 21 nt, artificial
  Oligomer
aagccacuguugcugcugucc

SEQ ID NO: 323 - RNA, 21 nt, artificial
  Oligomer
acaucaaguguauucaugaac

SEQ ID NO: 324 - RNA, 21 nt, artificial
  Oligomer
gaacaucaaguguauucauga

SEQ ID NO: 325 - RNA, 21 nt, artificial
  Oligomer
acuguugcugcuguccaggga

SEQ ID NO: 326 - RNA, 21 nt, artificial
  Oligomer
uguugcugcuguccagggacu

SEQ ID NO: 327 - RNA, 21 nt, artificial
  Oligomer
acuugaacaucaaguguauuc

SEQ ID NO: 328 - RNA, 21 nt, artificial
  Oligomer
ucuucauguaaacaguucuag

SEQ ID NO: 329 - RNA, 21 nt, artificial
  Oligomer
cauguaaacaguucuagaugg

SEQ ID NO: 330 - RNA, 21 nt, artificial
  Oligomer
guaaacaguucuagauggaag

SEQ ID NO: 331 - RNA, 21 nt, artificial
  Oligomer
uaaacaguucuagauggaaga

SEQ ID NO: 332 - RNA, 21 nt, artificial
  Oligomer
ucauguaaacaguucuagaug

SEQ ID NO: 333 - RNA, 21 nt, artificial
  Oligomer
acaguucuagauggaagaccc

SEQ ID NO: 334 - RNA, 21 nt, artificial
  Oligomer
auguaaacaguucuagaugga

SEQ ID NO: 335 - RNA, 21 nt, artificial
  Oligomer
cuucauguaaacaguucuaga

SEQ ID NO: 336 - RNA, 21 nt, artificial
  Oligomer
uguaaacaguucuagauggaa

SEQ ID NO: 337 - RNA, 21 nt, artificial
  Oligomer
aaacaguucuagauggaagac

SEQ ID NO: 338 - RNA, 21 nt, artificial
  Oligomer
ggucuuaauacuugaacauca

SEQ ID NO: 339 - RNA, 21 nt, artificial
  Oligomer
cauaggucuuaauacuugaac

SEQ ID NO: 340 - RNA, 21 nt, artificial
  Oligomer
ugcauaggucuuaauacuuga

SEQ ID NO: 341 - RNA, 21 nt, artificial
  Oligomer
aggucuuaauacuugaacauc

SEQ ID NO: 342 - RNA, 21 nt, artificial
  Oligomer
gcauaggucuuaauacuugaa

SEQ ID NO: 343 - RNA, 21 nt, artificial
  Oligomer
aguucuagauggaagacccag

SEQ ID NO: 344 - RNA, 21 nt, artificial
  Oligomer
caguucuagauggaagaccca

SEQ ID NO: 345 - RNA, 19 nt, artificial
  Oligomer
ccaggaagcucauugaguu

SEQ ID NO: 346 - RNA, 19 nt, artificial
  Oligomer
gcaugaaacaaaggcuuag

SEQ ID NO: 347 - RNA, 19 nt, artificial
  Oligomer
ucaugaauacacuugaugu

SEQ ID NO: 348 - RNA, 19 nt, artificial
  Oligomer
gcaugaauguaagaguagg

SEQ ID NO: 349 - RNA, 19 nt, artificial
  Oligomer
agacgacugaacuuuuggg

SEQ ID NO: 350 - RNA, 19 nt, artificial
  Oligomer
cguggaggugguuugugua

SEQ ID NO: 351 - RNA, 19 nt, artificial
  Oligomer
acaugaagauaagauacuc

SEQ ID NO: 352 - RNA, 19 nt, artificial
  Oligomer
aacagcugcucauugagga

SEQ ID NO: 353 - RNA, 19 nt, artificial
  Oligomer
uuguguaucuuacuggucu

SEQ ID NO: 354 - RNA, 19 nt, artificial
  Oligomer
gugugacauccagagagca

SEQ ID NO: 355 - RNA, 19 nt, artificial
  Oligomer
gaagcucauugaguugugu

SEQ ID NO: 356 - RNA, 19 nt, artificial
  Oligomer
gacugauuccugugguugg

SEQ ID NO: 357 - RNA, 19 nt, artificial
  Oligomer
ugaggaugaacacuugugu

SEQ ID NO: 358 - RNA, 19 nt, artificial
  Oligomer
ggaucuuugacacuugaaa

SEQ ID NO: 359 - RNA, 19 nt, artificial
  Oligomer
cauugaguugugugcgggu

SEQ ID NO: 360 - RNA, 19 nt, artificial
  Oligomer
cauugaggaguguugaacu

SEQ ID NO: 361 - RNA, 19 nt, artificial
  Oligomer
caucaagaagaagcuguac

SEQ ID NO: 362 - RNA, 19 nt, artificial
  Oligomer
cguguacugcagaguugag

SEQ ID NO: 363 - RNA, 19 nt, artificial
  Oligomer
ucguguacugcagaguuga

SEQ ID NO: 364 - RNA, 19 nt, artificial
  Oligomer
caugaauguaagaguagga

SEQ ID NO: 365 - RNA, 19 nt, artificial
  Oligomer
cuguuguaggcagcuaucu

SEQ ID NO: 366 - RNA, 19 nt, artificial
  Oligomer
ucuuguuuuucugaucgga

SEQ ID NO: 367 - RNA, 19 nt, artificial
  Oligomer
ugaagggaccaaguguguu

SEQ ID NO: 368 - RNA, 19 nt, artificial
  Oligomer
aguuaacaguggugugaca

SEQ ID NO: 369 - RNA, 19 nt, artificial
  Oligomer
uuccaucuagaacuguuua

SEQ ID NO: 370 - RNA, 19 nt, artificial
  Oligomer
cuuacagacgcaugaaugu

SEQ ID NO: 371 - RNA, 19 nt, artificial
  Oligomer
uucugaucggagcaucacu

SEQ ID NO: 372 - RNA, 19 nt, artificial
  Oligomer
gaugccuagccaguuggua

SEQ ID NO: 373 - RNA, 19 nt, artificial
  Oligomer
acuugugugccaaccugau

SEQ ID NO: 374 - RNA, 19 nt, artificial
  Oligomer
gaauacacuugauguucaa

SEQ ID NO: 375 - RNA, 19 nt, artificial
  Oligomer
aaguguguuuguuguuugu

SEQ ID NO: 376 - RNA, 19 nt, artificial
  Oligomer
auguguguguagcauguac

SEQ ID NO: 377 - RNA, 19 nt, artificial
  Oligomer
accuggcagcugcguuuaa

SEQ ID NO: 378 - RNA, 19 nt, artificial
  Oligomer
gucagggaucacuugggau

SEQ ID NO: 379 - RNA, 19 nt, artificial
  Oligomer
ucaccaugccuagccuuug

SEQ ID NO: 380 - RNA, 19 nt, artificial
  Oligomer
uuguuuuucugaucggagc

SEQ ID NO: 381 - RNA, 19 nt, artificial
  Oligomer
uguguaucuuacuggucug

SEQ ID NO: 382 - RNA, 19 nt, artificial
  Oligomer
cggcacucugaguucauca

SEQ ID NO: 383 - RNA, 19 nt, artificial
  Oligomer
guuucccaggaagcucauu

SEQ ID NO: 384 - RNA, 19 nt, artificial
  Oligomer
cugugguuggaaaacugag

SEQ ID NO: 385 - RNA, 19 nt, artificial
  Oligomer
acuugucuuagcaguucuc

SEQ ID NO: 386 - RNA, 19 nt, artificial
  Oligomer
aucacuugggaucuuugac

SEQ ID NO: 387 - RNA, 19 nt, artificial
  Oligomer
cucugaguucaucagcaaa

SEQ ID NO: 388 - RNA, 19 nt, artificial
  Oligomer
guagcauguaccuuauuau

SEQ ID NO: 389 - RNA, 19 nt, artificial
  Oligomer
ccugaggaugaacacuugu

SEQ ID NO: 390 - RNA, 19 nt, artificial
  Oligomer
acuguucaugaauacacuu

SEQ ID NO: 391 - RNA, 19 nt, artificial
  Oligomer
ccaucuagaacuguuuaca

SEQ ID NO: 392 - RNA, 19 nt, artificial
  Oligomer
uccaucuagaacuguuuac

SEQ ID NO: 393 - RNA, 19 nt, artificial
  Oligomer
cagacgcaugaauguaaga

SEQ ID NO: 394 - RNA, 19 nt, artificial
  Oligomer
ggugguuuguguaucuuac

SEQ ID NO: 395 - RNA, 19 nt, artificial
  Oligomer
caguuaacaguggugugac

SEQ ID NO: 396 - RNA, 19 nt, artificial
  Oligomer
guguguguagcauguaccu

SEQ ID NO: 397 - RNA, 19 nt, artificial
  Oligomer
acaaggcuuccagcuggau

SEQ ID NO: 398 - RNA, 19 nt, artificial
  Oligomer
caugaaacaaaggcuuagg

SEQ ID NO: 399 - RNA, 19 nt, artificial
  Oligomer
cugagggacugauuccugu

SEQ ID NO: 400 - RNA, 19 nt, artificial
  Oligomer
ucggaacagcugcucauug

SEQ ID NO: 401 - RNA, 19 nt, artificial
  Oligomer
cucggaacagcugcucauu

SEQ ID NO: 402 - RNA, 19 nt, artificial
  Oligomer
caaagaacuacugcgccug

SEQ ID NO: 403 - RNA, 19 nt, artificial
  Oligomer
acagacgcaugaauguaag

SEQ ID NO: 404 - RNA, 19 nt, artificial
  Oligomer
guaucuuguuuuucugauc

SEQ ID NO: 405 - RNA, 19 nt, artificial
  Oligomer
aagggaccaaguguguuug

SEQ ID NO: 406 - RNA, 19 nt, artificial
  Oligomer
ugguuuguguaucuuacug

SEQ ID NO: 407 - RNA, 19 nt, artificial
  Oligomer
cuuccagcuggaugugugu

SEQ ID NO: 408 - RNA, 19 nt, artificial
  Oligomer
caguacuguagcaugaaac

SEQ ID NO: 409 - RNA, 19 nt, artificial
  Oligomer
cuugucuuagcaguucucg

SEQ ID NO: 410 - RNA, 19 nt, artificial
  Oligomer
augccuagccaguugguaa

SEQ ID NO: 411 - RNA, 19 nt, artificial
  Oligomer
aagauacucacuguucaug

SEQ ID NO: 412 - RNA, 19 nt, artificial
  Oligomer
cuuccaucuagaacuguuu

SEQ ID NO: 413 - RNA, 19 nt, artificial
  Oligomer
ucuuccaucuagaacuguu

SEQ ID NO: 414 - RNA, 19 nt, artificial
  Oligomer
ucugggucuuccaucuaga

SEQ ID NO: 415 - RNA, 19 nt, artificial
  Oligomer
guguagcauguaccuuauu

SEQ ID NO: 416 - RNA, 19 nt, artificial
  Oligomer
aagcucauugaguugugug

SEQ ID NO: 417 - RNA, 19 nt, artificial
  Oligomer
uccggcacucugaguucau

SEQ ID NO: 418 - RNA, 19 nt, artificial
  Oligomer
uucgcacacccauucaagc

SEQ ID NO: 419 - RNA, 19 nt, artificial
  Oligomer
ugcucauugaggaguguug

SEQ ID NO: 420 - RNA, 19 nt, artificial
  Oligomer
uuccgagucaucaagaaga

SEQ ID NO: 421 - RNA, 19 nt, artificial
  Oligomer
ugaauacacuugauguuca

SEQ ID NO: 422 - RNA, 19 nt, artificial
  Oligomer
cacuguucaugaauacacu

SEQ ID NO: 423 - RNA, 19 nt, artificial
  Oligomer
cugggucuuccaucuagaa

SEQ ID NO: 424 - RNA, 19 nt, artificial
  Oligomer
ugaaaaauuacaccuggca

SEQ ID NO: 425 - RNA, 19 nt, artificial
  Oligomer
gacaguuaacaguggugug

SEQ ID NO: 426 - RNA, 19 nt, artificial
  Oligomer
gcuggauguguguguagca

SEQ ID NO: 427 - RNA, 19 nt, artificial
  Oligomer
uugaacuucaaccugaggg

SEQ ID NO: 428 - RNA, 19 nt, artificial
  Oligomer
ucauugaggaguguugaac

SEQ ID NO: 429 - RNA, 19 nt, artificial
  Oligomer
guucgcacacccauucaag

SEQ ID NO: 430 - RNA, 19 nt, artificial
  Oligomer
cugaggaugaacacuugug

SEQ ID NO: 431 - RNA, 19 nt, artificial
  Oligomer
agauaagauacucacuguu

SEQ ID NO: 432 - RNA, 19 nt, artificial
  Oligomer
gaaaaauuacaccuggcag

SEQ ID NO: 433 - RNA, 19 nt, artificial
  Oligomer
gaucuuugacacuugaaaa

SEQ ID NO: 434 - RNA, 19 nt, artificial
  Oligomer
ucuuacagacgcaugaaug

SEQ ID NO: 435 - RNA, 19 nt, artificial
  Oligomer
uguuguaggcagcuaucuu

SEQ ID NO: 436 - RNA, 19 nt, artificial
  Oligomer
ucuguccucaccaugccua

SEQ ID NO: 437 - RNA, 19 nt, artificial
  Oligomer
cuuguuuuucugaucggag

SEQ ID NO: 438 - RNA, 19 nt, artificial
  Oligomer
guuuguguaucuuacuggu

SEQ ID NO: 439 - RNA, 19 nt, artificial
  Oligomer
augaaacaaaggcuuaggg

SEQ ID NO: 440 - RNA, 19 nt, artificial
  Oligomer
gagacgacugaacuuuugg

SEQ ID NO: 441 - RNA, 19 nt, artificial
  Oligomer
uugaaaaauuacaccuggc

SEQ ID NO: 442 - RNA, 19 nt, artificial
  Oligomer
cacuugggaucuuugacac

SEQ ID NO: 443 - RNA, 19 nt, artificial
  Oligomer
aguggugugacauccagag

SEQ ID NO: 444 - RNA, 19 nt, artificial
  Oligomer
ugacaguuaacaguggugu

SEQ ID NO: 445 - RNA, 19 nt, artificial
  Oligomer
uuguuacugacaguuaaca

SEQ ID NO: 446 - RNA, 19 nt, artificial
  Oligomer
cuguuuagcuccgccaacu

SEQ ID NO: 447 - RNA, 19 nt, artificial
  Oligomer
ugcugaugccuagccaguu

SEQ ID NO: 448 - RNA, 19 nt, artificial
  Oligomer
gaagauaagauacucacug

SEQ ID NO: 449 - RNA, 19 nt, artificial
  Oligomer
gacacuugaaaaauuacac

SEQ ID NO: 450 - RNA, 19 nt, artificial
  Oligomer
ugucagggaucacuuggga

SEQ ID NO: 451 - RNA, 19 nt, artificial
  Oligomer
gaauguaagaguaggaagg

SEQ ID NO: 452 - RNA, 19 nt, artificial
  Oligomer
uguaggcagcuaucuuaca

SEQ ID NO: 453 - RNA, 19 nt, artificial
  Oligomer
uaucuuacuggucugaagg

SEQ ID NO: 454 - RNA, 19 nt, artificial
  Oligomer
guguaucuuacuggucuga

SEQ ID NO: 455 - RNA, 19 nt, artificial
  Oligomer
gugguuuguguaucuuacu

SEQ ID NO: 456 - RNA, 19 nt, artificial
  Oligomer
guuaacaguggugugacau

SEQ ID NO: 457 - RNA, 19 nt, artificial
  Oligomer
cacucugaguucaucagca

SEQ ID NO: 458 - RNA, 19 nt, artificial
  Oligomer
auugaguugugugcgggug

SEQ ID NO: 459 - RNA, 19 nt, artificial
  Oligomer
ucauugaguugugugcggg

SEQ ID NO: 460 - RNA, 19 nt, artificial
  Oligomer
cucauugaguugugugcgg

SEQ ID NO: 461 - RNA, 19 nt, artificial
  Oligomer
aauaguguuucccaggaag

SEQ ID NO: 462 - RNA, 19 nt, artificial
  Oligomer
cuuagcaguucucgcugac

SEQ ID NO: 463 - RNA, 19 nt, artificial
  Oligomer
uguugaacuucaaccugag

SEQ ID NO: 464 - RNA, 19 nt, artificial
  Oligomer
caugaagauaagauacuca

SEQ ID NO: 465 - RNA, 19 nt, artificial
  Oligomer
cuugaaaaauuacaccugg

SEQ ID NO: 466 - RNA, 19 nt, artificial
  Oligomer
gcaucacuacugaccuguu

SEQ ID NO: 467 - RNA, 19 nt, artificial
  Oligomer
uguuuuucugaucggagca

SEQ ID NO: 468 - RNA, 19 nt, artificial
  Oligomer
uaucuuguuuuucugaucg

SEQ ID NO: 469 - RNA, 19 nt, artificial
  Oligomer
accaaguguguuuguuguu

SEQ ID NO: 470 - RNA, 19 nt, artificial
  Oligomer
caggaagcucauugaguug

SEQ ID NO: 471 - RNA, 19 nt, artificial
  Oligomer
uaguguuucccaggaagcu

SEQ ID NO: 472 - RNA, 19 nt, artificial
  Oligomer
ugaggaguguugaacuuca

SEQ ID NO: 473 - RNA, 19 nt, artificial
  Oligomer
cugcucauugaggaguguu

SEQ ID NO: 474 - RNA, 19 nt, artificial
  Oligomer
acgcacuugucuuagcagu

SEQ ID NO: 475 - RNA, 19 nt, artificial
  Oligomer
ugaagauaagauacucacu

SEQ ID NO: 476 - RNA, 19 nt, artificial
  Oligomer
aaaaauuacaccuggcagc

SEQ ID NO: 477 - RNA, 19 nt, artificial
  Oligomer
uugggaucuuugacacuug

SEQ ID NO: 478 - RNA, 19 nt, artificial
  Oligomer
aucggagcaucacuacuga

SEQ ID NO: 479 - RNA, 19 nt, artificial
  Oligomer
aguguguuuguuguuuguu

SEQ ID NO: 480 - RNA, 19 nt, artificial
  Oligomer
aggugguuuguguaucuua

SEQ ID NO: 481 - RNA, 19 nt, artificial
  Oligomer
uggaggugguuuguguauc

SEQ ID NO: 482 - RNA, 19 nt, artificial
  Oligomer
caguggugugacauccaga

SEQ ID NO: 483 - RNA, 19 nt, artificial
  Oligomer
cagcuggauguguguguag

SEQ ID NO: 484 - RNA, 19 nt, artificial
  Oligomer
ucaguacuguagcaugaaa

SEQ ID NO: 485 - RNA, 19 nt, artificial
  Oligomer
gcucauugaguugugugcg

SEQ ID NO: 486 - RNA, 19 nt, artificial
  Oligomer
aacugaggcagccaccuaa

SEQ ID NO: 487 - RNA, 19 nt, artificial
  Oligomer
gauuccugugguuggaaaa

SEQ ID NO: 488 - RNA, 19 nt, artificial
  Oligomer
gaggaguguugaacuucaa

SEQ ID NO: 489 - RNA, 19 nt, artificial
  Oligomer
aucaagaagaagcuguaca

SEQ ID NO: 490 - RNA, 19 nt, artificial
  Oligomer
uguucaugaauacacuuga

SEQ ID NO: 491 - RNA, 19 nt, artificial
  Oligomer
ccaucguguacugcagagu

SEQ ID NO: 492 - RNA, 19 nt, artificial
  Oligomer
agacgcaugaauguaagag

SEQ ID NO: 493 - RNA, 19 nt, artificial
  Oligomer
cuaucuuacagacgcauga

SEQ ID NO: 494 - RNA, 19 nt, artificial
  Oligomer
ucugaucggagcaucacua

SEQ ID NO: 495 - RNA, 19 nt, artificial
  Oligomer
guucaucagcaaacgcccu

SEQ ID NO: 496 - RNA, 19 nt, artificial
  Oligomer
aucuuacuggucugaaggg

SEQ ID NO: 497 - RNA, 19 nt, artificial
  Oligomer
guggaggugguuuguguau

SEQ ID NO: 498 - RNA, 19 nt, artificial
  Oligomer
cuguagcaugaaacaaagg

SEQ ID NO: 499 - RNA, 19 nt, artificial
  Oligomer
ucuuagcaguucucgcuga

SEQ ID NO: 500 - RNA, 19 nt, artificial
  Oligomer
guugaacuucaaccugagg

SEQ ID NO: 501 - RNA, 19 nt, artificial
  Oligomer
gcugcucauugaggagugu

SEQ ID NO: 502 - RNA, 19 nt, artificial
  Oligomer
uugugugccaaccugaugc

SEQ ID NO: 503 - RNA, 19 nt, artificial
  Oligomer
cugaagggaccaagugugu

SEQ ID NO: 504 - RNA, 19 nt, artificial
  Oligomer
ucuuacuggucugaaggga

SEQ ID NO: 505 - RNA, 19 nt, artificial
  Oligomer
ggaagcucauugaguugug

SEQ ID NO: 506 - RNA, 19 nt, artificial
  Oligomer
uuagcaguucucgcugacc

SEQ ID NO: 507 - RNA, 19 nt, artificial
  Oligomer
aagacagagacgacugaac

SEQ ID NO: 508 - RNA, 19 nt, artificial
  Oligomer
aucugggucuuccaucuag

SEQ ID NO: 509 - RNA, 19 nt, artificial
  Oligomer
gggaucuuugacacuugaa

SEQ ID NO: 510 - RNA, 19 nt, artificial
  Oligomer
ggaucacuugggaucuuug

SEQ ID NO: 511 - RNA, 19 nt, artificial
  Oligomer
aucuuacagacgcaugaau

SEQ ID NO: 512 - RNA, 19 nt, artificial
  Oligomer
uuguaggcagcuaucuuac

SEQ ID NO: 513 - RNA, 19 nt, artificial
  Oligomer
ugacauccagagagcagcu

SEQ ID NO: 514 - RNA, 19 nt, artificial
  Oligomer
auaguguuucccaggaagc

SEQ ID NO: 515 - RNA, 19 nt, artificial
  Oligomer
agaagcuguacagcucgga

SEQ ID NO: 516 - RNA, 19 nt, artificial
  Oligomer
aauacacuugauguucaag

SEQ ID NO: 517 - RNA, 19 nt, artificial
  Oligomer
cuguuuacaugaagauaag

SEQ ID NO: 518 - RNA, 19 nt, artificial
  Oligomer
guguacugcagaguugagc

SEQ ID NO: 519 - RNA, 19 nt, artificial
  Oligomer
gaucacuugggaucuuuga

SEQ ID NO: 520 - RNA, 19 nt, artificial
  Oligomer
cucaccaugccuagccuuu

SEQ ID NO: 521 - RNA, 19 nt, artificial
  Oligomer
ugaccuguuguaggcagcu

SEQ ID NO: 522 - RNA, 19 nt, artificial
  Oligomer
ucggagcaucacuacugac

SEQ ID NO: 523 - RNA, 19 nt, artificial
  Oligomer
uuaacaguggugugacauc

SEQ ID NO: 524 - RNA, 19 nt, artificial
  Oligomer
ggaauaguguuucccagga

SEQ ID NO: 525 - RNA, 19 nt, artificial
  Oligomer
uuggaaaacugaggcagcc

SEQ ID NO: 526 - RNA, 19 nt, artificial
  Oligomer
ugugguuggaaaacugagg

SEQ ID NO: 527 - RNA, 19 nt, artificial
  Oligomer
ugauuccugugguuggaaa

SEQ ID NO: 528 - RNA, 19 nt, artificial
  Oligomer
acugauuccugugguugga

SEQ ID NO: 529 - RNA, 19 nt, artificial
  Oligomer
ugagggacugauuccugug

SEQ ID NO: 530 - RNA, 19 nt, artificial
  Oligomer
uugucuuagcaguucucgc

SEQ ID NO: 531 - RNA, 19 nt, artificial
  Oligomer
agcugcucauugaggagug

SEQ ID NO: 532 - RNA, 19 nt, artificial
  Oligomer
aaagaacuacugcgccugg

SEQ ID NO: 533 - RNA, 19 nt, artificial
  Oligomer
cuugugugccaaccugaug

SEQ ID NO: 534 - RNA, 19 nt, artificial
  Oligomer
ugaacacuugugugccaac

SEQ ID NO: 535 - RNA, 19 nt, artificial
  Oligomer
aguauuaagaccuaugcaa

SEQ ID NO: 536 - RNA, 19 nt, artificial
  Oligomer
uguucaaguauuaagaccu

SEQ ID NO: 537 - RNA, 19 nt, artificial
  Oligomer
gauguucaaguauuaagac

SEQ ID NO: 538 - RNA, 19 nt, artificial
  Oligomer
gugacccugaggaugaaca

SEQ ID NO: 539 - RNA, 19 nt, artificial
  Oligomer
gggucuuccaucuagaacu

SEQ ID NO: 540 - RNA, 19 nt, artificial
  Oligomer
agggaccaaguguguuugu

SEQ ID NO: 541 - RNA, 19 nt, artificial
  Oligomer
uuuguguaucuuacugguc

SEQ ID NO: 542 - RNA, 19 nt, artificial
  Oligomer
cucauugaggaguguugaa

SEQ ID NO: 543 - RNA, 19 nt, artificial
  Oligomer
gcucauugaggaguguuga

SEQ ID NO: 544 - RNA, 19 nt, artificial
  Oligomer
uguuuagcuccgccaacuc

SEQ ID NO: 545 - RNA, 19 nt, artificial
  Oligomer
augaacacuugugugccaa

SEQ ID NO: 546 - RNA, 19 nt, artificial
  Oligomer
gaugaacacuugugugcca

SEQ ID NO: 547 - RNA, 19 nt, artificial
  Oligomer
caaguauuaagaccuaugc

SEQ ID NO: 548 - RNA, 19 nt, artificial
  Oligomer
acacuugaaaaauuacacc

SEQ ID NO: 549 - RNA, 19 nt, artificial
  Oligomer
uaggcagcuaucuuacaga

SEQ ID NO: 550 - RNA, 19 nt, artificial
  Oligomer
accuguuguaggcagcuau

SEQ ID NO: 551 - RNA, 19 nt, artificial
  Oligomer
cacuacugaccuguuguag

SEQ ID NO: 552 - RNA, 19 nt, artificial
  Oligomer
uacuggucugaagggacca

SEQ ID NO: 553 - RNA, 19 nt, artificial
  Oligomer
uguguguguagcauguacc

SEQ ID NO: 554 - RNA, 19 nt, artificial
  Oligomer
uuccagcuggaugugugug

SEQ ID NO: 555 - RNA, 19 nt, artificial
  Oligomer
agcucauugaguugugugc

SEQ ID NO: 556 - RNA, 19 nt, artificial
  Oligomer
auugaggaguguugaacuu

SEQ ID NO: 557 - RNA, 19 nt, artificial
  Oligomer
ccgagucaucaagaagaag

SEQ ID NO: 558 - RNA, 19 nt, artificial
  Oligomer
ggugggcaaagaacuacug

SEQ ID NO: 559 - RNA, 19 nt, artificial
  Oligomer
aaguauuaagaccuaugca

SEQ ID NO: 560 - RNA, 19 nt, artificial
  Oligomer
agcugcguuuaagccuucc

SEQ ID NO: 561 - RNA, 19 nt, artificial
  Oligomer
gcagcugcguuuaagccuu

SEQ ID NO: 562 - RNA, 19 nt, artificial
  Oligomer
acuugggaucuuugacacu

SEQ ID NO: 563 - RNA, 19 nt, artificial
  Oligomer
cuacugaccuguuguaggc

SEQ ID NO: 564 - RNA, 19 nt, artificial
  Oligomer
uguaucuuacuggucugaa

SEQ ID NO: 565 - RNA, 19 nt, artificial
  Oligomer
cugacaguuaacaguggug

SEQ ID NO: 566 - RNA, 19 nt, artificial
  Oligomer
acugacaguuaacaguggu

SEQ ID NO: 567 - RNA, 19 nt, artificial
  Oligomer
uccagcuggaugugugugu

SEQ ID NO: 568 - RNA, 19 nt, artificial
  Oligomer
uguagcaugaaacaaaggc

SEQ ID NO: 569 - RNA, 19 nt, artificial
  Oligomer
ccucaguacuguagcauga

SEQ ID NO: 570 - RNA, 19 nt, artificial
  Oligomer
cccaggaagcucauugagu

SEQ ID NO: 571 - RNA, 19 nt, artificial
  Oligomer
uuucccaggaagcucauug

SEQ ID NO: 572 - RNA, 19 nt, artificial
  Oligomer
aggaguguugaacuucaac

SEQ ID NO: 573 - RNA, 19 nt, artificial
  Oligomer
aggacgcacuugucuuagc

SEQ ID NO: 574 - RNA, 19 nt, artificial
  Oligomer
acuucgagcugcucaguga

SEQ ID NO: 575 - RNA, 19 nt, artificial
  Oligomer
cacuugaaaaauuacaccu

SEQ ID NO: 576 - RNA, 19 nt, artificial
  Oligomer
caggacgcacuugucuuag

SEQ ID NO: 577 - RNA, 19 nt, artificial
  Oligomer
ucagggaucacuugggauc

SEQ ID NO: 578 - RNA, 19 nt, artificial
  Oligomer
acuacugaccuguuguagg

SEQ ID NO: 579 - RNA, 19 nt, artificial
  Oligomer
aucacuacugaccuguugu

SEQ ID NO: 580 - RNA, 19 nt, artificial
  Oligomer
guuuuucugaucggagcau

SEQ ID NO: 581 - RNA, 19 nt, artificial
  Oligomer
ucugaagggaccaagugug

SEQ ID NO: 582 - RNA, 19 nt, artificial
  Oligomer
cccucaguacuguagcaug

SEQ ID NO: 583 - RNA, 19 nt, artificial
  Oligomer
cacuugucuuagcaguucu

SEQ ID NO: 584 - RNA, 19 nt, artificial
  Oligomer
acuggcuuccgagucauca

SEQ ID NO: 585 - RNA, 19 nt, artificial
  Oligomer
ugccuagccaguugguaag

SEQ ID NO: 586 - RNA, 19 nt, artificial
  Oligomer
auacacuugauguucaagu

SEQ ID NO: 587 - RNA, 19 nt, artificial
  Oligomer
cuguucaugaauacacuug

SEQ ID NO: 588 - RNA, 19 nt, artificial
  Oligomer
aucguguacugcagaguug

SEQ ID NO: 589 - RNA, 19 nt, artificial
  Oligomer
aaauuacaccuggcagcug

SEQ ID NO: 590 - RNA, 19 nt, artificial
  Oligomer
gggaucacuugggaucuuu

SEQ ID NO: 591 - RNA, 19 nt, artificial
  Oligomer
cagggaucacuugggaucu

SEQ ID NO: 592 - RNA, 19 nt, artificial
  Oligomer
ugaauguaagaguaggaag

SEQ ID NO: 593 - RNA, 19 nt, artificial
  Oligomer
guguuuguuguuuguuuug

SEQ ID NO: 594 - RNA, 19 nt, artificial
  Oligomer
acucugaguucaucagcaa

SEQ ID NO: 595 - RNA, 19 nt, artificial
  Oligomer
uguguguagcauguaccuu

SEQ ID NO: 596 - RNA, 19 nt, artificial
  Oligomer
gguuggaaaacugaggcag

SEQ ID NO: 597 - RNA, 19 nt, artificial
  Oligomer
cugauuccugugguuggaa

SEQ ID NO: 598 - RNA, 19 nt, artificial
  Oligomer
agcugagggacugauuccu

SEQ ID NO: 599 - RNA, 19 nt, artificial
  Oligomer
aagccaggugggcaaagaa

SEQ ID NO: 600 - RNA, 19 nt, artificial
  Oligomer
ucaaguauuaagaccuaug

SEQ ID NO: 601 - RNA, 19 nt, artificial
  Oligomer
uucaugaauacacuugaug

SEQ ID NO: 602 - RNA, 19 nt, artificial
  Oligomer
ugccaucugggucuuccau

SEQ ID NO: 603 - RNA, 19 nt, artificial
  Oligomer
acuugaaaaauuacaccug

SEQ ID NO: 604 - RNA, 19 nt, artificial
  Oligomer
augaauguaagaguaggaa

SEQ ID NO: 605 - RNA, 19 nt, artificial
  Oligomer
ggagcaucacuacugaccu

SEQ ID NO: 606 - RNA, 19 nt, artificial
  Oligomer
uacugacaguuaacagugg

SEQ ID NO: 607 - RNA, 19 nt, artificial
  Oligomer
cuggauguguguguagcau

SEQ ID NO: 608 - RNA, 19 nt, artificial
  Oligomer
aaggcuuccagcuggaugu

SEQ ID NO: 609 - RNA, 19 nt, artificial
  Oligomer
guguuucccaggaagcuca

SEQ ID NO: 610 - RNA, 19 nt, artificial
  Oligomer
gaauaguguuucccaggaa

SEQ ID NO: 611 - RNA, 19 nt, artificial
  Oligomer
gugguuggaaaacugaggc

SEQ ID NO: 612 - RNA, 19 nt, artificial
  Oligomer
ccugugguuggaaaacuga

SEQ ID NO: 613 - RNA, 19 nt, artificial
  Oligomer
gggacugauuccugugguu

SEQ ID NO: 614 - RNA, 19 nt, artificial
  Oligomer
agggacugauuccuguggu

SEQ ID NO: 615 - RNA, 19 nt, artificial
  Oligomer
ggaugaacacuugugugcc

SEQ ID NO: 616 - RNA, 19 nt, artificial
  Oligomer
auguucaaguauuaagacc

SEQ ID NO: 617 - RNA, 19 nt, artificial
  Oligomer
aagacacggcuuaccugga

SEQ ID NO: 618 - RNA, 19 nt, artificial
  Oligomer
uacagacgcaugaauguaa

SEQ ID NO: 619 - RNA, 19 nt, artificial
  Oligomer
acagcagcaacaguggcuu

SEQ ID NO: 620 - RNA, 19 nt, artificial
  Oligomer
gcagcuaucuuacagacgc

SEQ ID NO: 621 - RNA, 19 nt, artificial
  Oligomer
aucuuguuuuucugaucgg

SEQ ID NO: 622 - RNA, 19 nt, artificial
  Oligomer
ugugacauccagagagcag

SEQ ID NO: 623 - RNA, 19 nt, artificial
  Oligomer
gauguguguguagcaugua

SEQ ID NO: 624 - RNA, 19 nt, artificial
  Oligomer
aacaaggcuuccagcugga

SEQ ID NO: 625 - RNA, 19 nt, artificial
  Oligomer
guagcaugaaacaaaggcu

SEQ ID NO: 626 - RNA, 19 nt, artificial
  Oligomer
cgagucaucaagaagaagc

SEQ ID NO: 627 - RNA, 19 nt, artificial
  Oligomer
ugaugccuagccaguuggu

SEQ ID NO: 628 - RNA, 19 nt, artificial
  Oligomer
augaauacacuugauguuc

SEQ ID NO: 629 - RNA, 19 nt, artificial
  Oligomer
aauguaagaguaggaaggg

SEQ ID NO: 630 - RNA, 19 nt, artificial
  Oligomer
gacgcaugaauguaagagu

SEQ ID NO: 631 - RNA, 19 nt, artificial
  Oligomer
uacugaccuguuguaggca

SEQ ID NO: 632 - RNA, 19 nt, artificial
  Oligomer
gucugaagggaccaagugu

SEQ ID NO: 633 - RNA, 19 nt, artificial
  Oligomer
uuuguuacugacaguuaac

SEQ ID NO: 634 - RNA, 19 nt, artificial
  Oligomer
agcaugaaacaaaggcuua

SEQ ID NO: 635 - RNA, 19 nt, artificial
  Oligomer
acuguagcaugaaacaaag

SEQ ID NO: 636 - RNA, 19 nt, artificial
  Oligomer
aguacuguagcaugaaaca

SEQ ID NO: 637 - RNA, 19 nt, artificial
  Oligomer
ggaacagcugcucauugag

SEQ ID NO: 638 - RNA, 19 nt, artificial
  Oligomer
gagucaucaagaagaagcu

SEQ ID NO: 639 - RNA, 19 nt, artificial
  Oligomer
uccgagucaucaagaagaa

SEQ ID NO: 640 - RNA, 19 nt, artificial
  Oligomer
cuggcuuccgagucaucaa

SEQ ID NO: 641 - RNA, 19 nt, artificial
  Oligomer
gaggaugaacacuugugug

SEQ ID NO: 642 - RNA, 19 nt, artificial
  Oligomer
augaagauaagauacucac

SEQ ID NO: 643 - RNA, 19 nt, artificial
  Oligomer
uguacugcagaguugagcu

SEQ ID NO: 644 - RNA, 19 nt, artificial
  Oligomer
agggaucacuugggaucuu

SEQ ID NO: 645 - RNA, 19 nt, artificial
  Oligomer
ugggugucagggaucacuu

SEQ ID NO: 646 - RNA, 19 nt, artificial
  Oligomer
agcuaucuuacagacgcau

SEQ ID NO: 647 - RNA, 19 nt, artificial
  Oligomer
acugaccuguuguaggcag

SEQ ID NO: 648 - RNA, 19 nt, artificial
  Oligomer
uuuucugaucggagcauca

SEQ ID NO: 649 - RNA, 19 nt, artificial
  Oligomer
aggaagcucauugaguugu

SEQ ID NO: 650 - RNA, 19 nt, artificial
  Oligomer
aagaagcuguacagcucgg

SEQ ID NO: 651 - RNA, 19 nt, artificial
  Oligomer
uuuagcuccgccaacucuc

SEQ ID NO: 652 - RNA, 19 nt, artificial
  Oligomer
gcaaagaacuacugcgccu

SEQ ID NO: 653 - RNA, 19 nt, artificial
  Oligomer
gaacacuugugugccaacc

SEQ ID NO: 654 - RNA, 19 nt, artificial
  Oligomer
ugacccugaggaugaacac

SEQ ID NO: 655 - RNA, 19 nt, artificial
  Oligomer
agugacccugaggaugaac

SEQ ID NO: 656 - RNA, 19 nt, artificial
  Oligomer
gucuuccaucuagaacugu

SEQ ID NO: 657 - RNA, 19 nt, artificial
  Oligomer
aauuacaccuggcagcugc

SEQ ID NO: 658 - RNA, 19 nt, artificial
  Oligomer
gguuuguguaucuuacugg

SEQ ID NO: 659 - RNA, 19 nt, artificial
  Oligomer
uggauguguguguagcaug

SEQ ID NO: 660 - RNA, 19 nt, artificial
  Oligomer
aaaacugaggcagccaccu

SEQ ID NO: 661 - RNA, 19 nt, artificial
  Oligomer
aggagcugagggacugauu

SEQ ID NO: 662 - RNA, 19 nt, artificial
  Oligomer
guuuagcuccgccaacucu

SEQ ID NO: 663 - RNA, 19 nt, artificial
  Oligomer
ugggcaaagaacuacugcg

SEQ ID NO: 664 - RNA, 19 nt, artificial
  Oligomer
gacgcacuugucuuagcag

SEQ ID NO: 665 - RNA, 19 nt, artificial
  Oligomer
cacuugauguucaaguauu

SEQ ID NO: 666 - RNA, 19 nt, artificial
  Oligomer
agauacucacuguucauga

SEQ ID NO: 667 - RNA, 19 nt, artificial
  Oligomer
uacugcagaguugagcugg

SEQ ID NO: 668 - RNA, 19 nt, artificial
  Oligomer
cgcaugaauguaagaguag

SEQ ID NO: 669 - RNA, 19 nt, artificial
  Oligomer
uuuuucugaucggagcauc

SEQ ID NO: 670 - RNA, 19 nt, artificial
  Oligomer
uuacuggucugaagggacc

SEQ ID NO: 671 - RNA, 19 nt, artificial
  Oligomer
cugaguucaucagcaaacg

SEQ ID NO: 672 - RNA, 19 nt, artificial
  Oligomer
uggugugacauccagagag

SEQ ID NO: 673 - RNA, 19 nt, artificial
  Oligomer
acaguggugugacauccag

SEQ ID NO: 674 - RNA, 19 nt, artificial
  Oligomer
cucaguacuguagcaugaa

SEQ ID NO: 675 - RNA, 19 nt, artificial
  Oligomer
aguguuucccaggaagcuc

SEQ ID NO: 676 - RNA, 19 nt, artificial
  Oligomer
ggacugauuccugugguug

SEQ ID NO: 677 - RNA, 19 nt, artificial
  Oligomer
cagagacgacugaacuuuu

SEQ ID NO: 678 - RNA, 19 nt, artificial
  Oligomer
gaguguugaacuucaaccu

SEQ ID NO: 679 - RNA, 19 nt, artificial
  Oligomer
gaacagcugcucauugagg

SEQ ID NO: 680 - RNA, 19 nt, artificial
  Oligomer
gaagcuguacagcucggaa

SEQ ID NO: 681 - RNA, 19 nt, artificial
  Oligomer
gaagaagcuguacagcucg

SEQ ID NO: 682 - RNA, 19 nt, artificial
  Oligomer
gguucgcacacccauucaa

SEQ ID NO: 683 - RNA, 19 nt, artificial
  Oligomer
cagcuaucuuacagacgca

SEQ ID NO: 684 - RNA, 19 nt, artificial
  Oligomer
ccuguuguaggcagcuauc

SEQ ID NO: 685 - RNA, 19 nt, artificial
  Oligomer
aguucaucagcaaacgccc

SEQ ID NO: 686 - RNA, 19 nt, artificial
  Oligomer
acuggucugaagggaccaa

SEQ ID NO: 687 - RNA, 19 nt, artificial
  Oligomer
ucugaguucaucagcaaac

SEQ ID NO: 688 - RNA, 19 nt, artificial
  Oligomer
guuggaaaacugaggcagc

SEQ ID NO: 689 - RNA, 19 nt, artificial
  Oligomer
uccugugguuggaaaacug

SEQ ID NO: 690 - RNA, 19 nt, artificial
  Oligomer
gucuuagcaguucucgcug

SEQ ID NO: 691 - RNA, 19 nt, artificial
  Oligomer
guguugaacuucaaccuga

SEQ ID NO: 692 - RNA, 19 nt, artificial
  Oligomer
ggaguguugaacuucaacc

SEQ ID NO: 693 - RNA, 19 nt, artificial
  Oligomer
uguacagcucggaacagcu

SEQ ID NO: 694 - RNA, 19 nt, artificial
  Oligomer
agcuguacagcucggaaca

SEQ ID NO: 695 - RNA, 19 nt, artificial
  Oligomer
gucaucaagaagaagcugu

SEQ ID NO: 696 - RNA, 19 nt, artificial
  Oligomer
cgcacuugucuuagcaguu

SEQ ID NO: 697 - RNA, 19 nt, artificial
  Oligomer
ucagugacccugaggauga

SEQ ID NO: 698 - RNA, 19 nt, artificial
  Oligomer
ucccaggaagcucauugag

SEQ ID NO: 699 - RNA, 19 nt, artificial
  Oligomer
ugucuuagcaguucucgcu

SEQ ID NO: 700 - RNA, 19 nt, artificial
  Oligomer
acagcugcucauugaggag

SEQ ID NO: 701 - RNA, 19 nt, artificial
  Oligomer
aagcuguacagcucggaac

SEQ ID NO: 702 - RNA, 19 nt, artificial
  Oligomer
uagccaguugguaagccag

SEQ ID NO: 703 - RNA, 19 nt, artificial
  Oligomer
acucacuguucaugaauac

SEQ ID NO: 704 - RNA, 19 nt, artificial
  Oligomer
auacucacuguucaugaau

SEQ ID NO: 705 - RNA, 19 nt, artificial
  Oligomer
guacugcagaguugagcug

SEQ ID NO: 706 - RNA, 19 nt, artificial
  Oligomer
cagcugcguuuaagccuuc

SEQ ID NO: 707 - RNA, 19 nt, artificial
  Oligomer
cuuacuggucugaagggac

SEQ ID NO: 708 - RNA, 19 nt, artificial
  Oligomer
uguuucccaggaagcucau

SEQ ID NO: 709 - RNA, 19 nt, artificial
  Oligomer
caagaagaagcuguacagc

SEQ ID NO: 710 - RNA, 19 nt, artificial
  Oligomer
gagcaucacuacugaccug

SEQ ID NO: 711 - RNA, 19 nt, artificial
  Oligomer
ugaucggagcaucacuacu

SEQ ID NO: 712 - RNA, 19 nt, artificial
  Oligomer
uucaucagcaaacgcccug

SEQ ID NO: 713 - RNA, 19 nt, artificial
  Oligomer
uaacaguggugugacaucc

SEQ ID NO: 714 - RNA, 19 nt, artificial
  Oligomer
uguuacugacaguuaacag

SEQ ID NO: 715 - RNA, 19 nt, artificial
  Oligomer
agcuggauguguguguagc

SEQ ID NO: 716 - RNA, 19 nt, artificial
  Oligomer
gugggcaaagaacuacugc

SEQ ID NO: 717 - RNA, 19 nt, artificial
  Oligomer
cacuugugugccaaccuga

SEQ ID NO: 718 - RNA, 19 nt, artificial
  Oligomer
gcuaucuuacagacgcaug

SEQ ID NO: 719 - RNA, 19 nt, artificial
  Oligomer
uagcaugaaacaaaggcuu

SEQ ID NO: 720 - RNA, 19 nt, artificial
  Oligomer
uugaggaguguugaacuuc

SEQ ID NO: 721 - RNA, 19 nt, artificial
  Oligomer
uggcuuccgagucaucaag

SEQ ID NO: 722 - RNA, 19 nt, artificial
  Oligomer
uuucugaucggagcaucac

SEQ ID NO: 723 - RNA, 19 nt, artificial
  Oligomer
uggucugaagggaccaagu

SEQ ID NO: 724 - RNA, 19 nt, artificial
  Oligomer
uccaagacagagacgacug

SEQ ID NO: 725 - RNA, 19 nt, artificial
  Oligomer
cagcugcucauugaggagu

SEQ ID NO: 726 - RNA, 19 nt, artificial
  Oligomer
ugggucuuccaucuagaac

SEQ ID NO: 727 - RNA, 19 nt, artificial
  Oligomer
gaccuguuguaggcagcua

SEQ ID NO: 728 - RNA, 19 nt, artificial
  Oligomer
uucccaggaagcucauuga

SEQ ID NO: 729 - RNA, 19 nt, artificial
  Oligomer
agaagaagcuguacagcuc

SEQ ID NO: 730 - RNA, 19 nt, artificial
  Oligomer
agucaucaagaagaagcug

SEQ ID NO: 731 - RNA, 19 nt, artificial
  Oligomer
cuagccaguugguaagcca

SEQ ID NO: 732 - RNA, 19 nt, artificial
  Oligomer
aggaugaacacuugugugc

SEQ ID NO: 733 - RNA, 19 nt, artificial
  Oligomer
aggcagcuaucuuacagac

SEQ ID NO: 734 - RNA, 19 nt, artificial
  Oligomer
auuccugugguuggaaaac

SEQ ID NO: 735 - RNA, 19 nt, artificial
  Oligomer
cuuccgagucaucaagaag

SEQ ID NO: 736 - RNA, 19 nt, artificial
  Oligomer
acccugaggaugaacacuu

SEQ ID NO: 737 - RNA, 19 nt, artificial
  Oligomer
aggaagacacggcuuaccu

SEQ ID NO: 738 - RNA, 19 nt, artificial
  Oligomer
uuacagacgcaugaaugua

SEQ ID NO: 739 - RNA, 19 nt, artificial
  Oligomer
ggcuuccgagucaucaaga

SEQ ID NO: 740 - RNA, 19 nt, artificial
  Oligomer
acacuugugugccaaccug

SEQ ID NO: 741 - RNA, 19 nt, artificial
  Oligomer
uacacuugauguucaagua

SEQ ID NO: 742 - RNA, 19 nt, artificial
  Oligomer
aaaauuacaccuggcagcu

SEQ ID NO: 743 - RNA, 19 nt, artificial
  Oligomer
aggugggcaaagaacuacu

SEQ ID NO: 744 - RNA, 19 nt, artificial
  Oligomer
caggugggcaaagaacuac

SEQ ID NO: 745 - RNA, 19 nt, artificial
  Oligomer
acacuugauguucaaguau

SEQ ID NO: 746 - RNA, 19 nt, artificial
  Oligomer
gacccugaggaugaacacu

SEQ ID NO: 747 - RNA, 19 nt, artificial
  Oligomer
uaucuuacagacgcaugaa

SEQ ID NO: 748 - RNA, 19 nt, artificial
  Oligomer
gcacucugaguucaucagc

SEQ ID NO: 749 - RNA, 19 nt, artificial
  Oligomer
uacuguagcaugaaacaaa

SEQ ID NO: 750 - RNA, 19 nt, artificial
  Oligomer
guacuguagcaugaaacaa

SEQ ID NO: 751 - RNA, 19 nt, artificial
  Oligomer
uggaaaacugaggcagcca

SEQ ID NO: 752 - RNA, 19 nt, artificial
  Oligomer
uuccugugguuggaaaacu

SEQ ID NO: 753 - RNA, 19 nt, artificial
  Oligomer
aagaagaagcuguacagcu

SEQ ID NO: 754 - RNA, 19 nt, artificial
  Oligomer
ucacuguucaugaauacac

SEQ ID NO: 755 - RNA, 19 nt, artificial
  Oligomer
cugaucggagcaucacuac

SEQ ID NO: 756 - RNA, 19 nt, artificial
  Oligomer
guuacugacaguuaacagu

SEQ ID NO: 757 - RNA, 19 nt, artificial
  Oligomer
agcaucacuacugaccugu

SEQ ID NO: 758 - RNA, 19 nt, artificial
  Oligomer
ugaguucaucagcaaacgc

SEQ ID NO: 759 - RNA, 19 nt, artificial
  Oligomer
ggcacucugaguucaucag

SEQ ID NO: 760 - RNA, 19 nt, artificial
  Oligomer
aacacuugugugccaaccu

SEQ ID NO: 761 - RNA, 19 nt, artificial
  Oligomer
uuacugacaguuaacagug

SEQ ID NO: 762 - RNA, 19 nt, artificial
  Oligomer
gggaauaguguuucccagg

SEQ ID NO: 763 - RNA, 19 nt, artificial
  Oligomer
ugguuggaaaacugaggca

SEQ ID NO: 764 - RNA, 19 nt, artificial
  Oligomer
ggcagcuaucuuacagacg

SEQ ID NO: 765 - RNA, 19 nt, artificial
  Oligomer
aacaguggugugacaucca

SEQ ID NO: 766 - RNA, 19 nt, artificial
  Oligomer
ugugugccaaccugaugca

SEQ ID NO: 767 - RNA, 19 nt, artificial
  Oligomer
cucacuguucaugaauaca

SEQ ID NO: 768 - RNA, 19 nt, artificial
  Oligomer
gaguucaucagcaaacgcc

SEQ ID NO: 769 - RNA, 19 nt, artificial
  Oligomer
aguguugaacuucaaccug

SEQ ID NO: 770 - RNA, 19 nt, artificial
  Oligomer
guggugugacauccagaga

SEQ ID NO: 771 - RNA, 19 nt, artificial
  Oligomer
aacucaaugagcuuccugg

SEQ ID NO: 772 - RNA, 19 nt, artificial
  Oligomer
cuaagccuuuguuucaugc

SEQ ID NO: 773 - RNA, 19 nt, artificial
  Oligomer
acaucaaguguauucauga

SEQ ID NO: 774 - RNA, 19 nt, artificial
  Oligomer
ccuacucuuacauucaugc

SEQ ID NO: 775 - RNA, 19 nt, artificial
  Oligomer
cccaaaaguucagucgucu

SEQ ID NO: 776 - RNA, 19 nt, artificial
  Oligomer
uacacaaaccaccuccacg

SEQ ID NO: 777 - RNA, 19 nt, artificial
  Oligomer
gaguaucuuaucuucaugu

SEQ ID NO: 778 - RNA, 19 nt, artificial
  Oligomer
uccucaaugagcagcuguu

SEQ ID NO: 779 - RNA, 19 nt, artificial
  Oligomer
agaccaguaagauacacaa

SEQ ID NO: 780 - RNA, 19 nt, artificial
  Oligomer
ugcucucuggaugucacac

SEQ ID NO: 781 - RNA, 19 nt, artificial
  Oligomer
acacaacucaaugagcuuc

SEQ ID NO: 782 - RNA, 19 nt, artificial
  Oligomer
ccaaccacaggaaucaguc

SEQ ID NO: 783 - RNA, 19 nt, artificial
  Oligomer
acacaaguguucauccuca

SEQ ID NO: 784 - RNA, 19 nt, artificial
  Oligomer
uuucaagugucaaagaucc

SEQ ID NO: 785 - RNA, 19 nt, artificial
  Oligomer
acccgcacacaacucaaug

SEQ ID NO: 786 - RNA, 19 nt, artificial
  Oligomer
aguucaacacuccucaaug

SEQ ID NO: 787 - RNA, 19 nt, artificial
  Oligomer
guacagcuucuucuugaug

SEQ ID NO: 788 - RNA, 19 nt, artificial
  Oligomer
cucaacucugcaguacacg

SEQ ID NO: 789 - RNA, 19 nt, artificial
  Oligomer
ucaacucugcaguacacga

SEQ ID NO: 790 - RNA, 19 nt, artificial
  Oligomer
uccuacucuuacauucaug

SEQ ID NO: 791 - RNA, 19 nt, artificial
  Oligomer
agauagcugccuacaacag

SEQ ID NO: 792 - RNA, 19 nt, artificial
  Oligomer
uccgaucagaaaaacaaga

SEQ ID NO: 793 - RNA, 19 nt, artificial
  Oligomer
aacacacuuggucccuuca

SEQ ID NO: 794 - RNA, 19 nt, artificial
  Oligomer
ugucacaccacuguuaacu

SEQ ID NO: 795 - RNA, 19 nt, artificial
  Oligomer
uaaacaguucuagauggaa

SEQ ID NO: 796 - RNA, 19 nt, artificial
  Oligomer
acauucaugcgucuguaag

SEQ ID NO: 797 - RNA, 19 nt, artificial
  Oligomer
agugaugcuccgaucagaa

SEQ ID NO: 798 - RNA, 19 nt, artificial
  Oligomer
uaccaacuggcuaggcauc

SEQ ID NO: 799 - RNA, 19 nt, artificial
  Oligomer
aucagguuggcacacaagu

SEQ ID NO: 800 - RNA, 19 nt, artificial
  Oligomer
uugaacaucaaguguauuc

SEQ ID NO: 801 - RNA, 19 nt, artificial
  Oligomer
acaaacaacaaacacacuu

SEQ ID NO: 802 - RNA, 19 nt, artificial
  Oligomer
guacaugcuacacacacau

SEQ ID NO: 803 - RNA, 19 nt, artificial
  Oligomer
uuaaacgcagcugccaggu

SEQ ID NO: 804 - RNA, 19 nt, artificial
  Oligomer
aucccaagugaucccugac

SEQ ID NO: 805 - RNA, 19 nt, artificial
  Oligomer
caaaggcuaggcaugguga

SEQ ID NO: 806 - RNA, 19 nt, artificial
  Oligomer
gcuccgaucagaaaaacaa

SEQ ID NO: 807 - RNA, 19 nt, artificial
  Oligomer
cagaccaguaagauacaca

SEQ ID NO: 808 - RNA, 19 nt, artificial
  Oligomer
ugaugaacucagagugccg

SEQ ID NO: 809 - RNA, 19 nt, artificial
  Oligomer
aaugagcuuccugggaaac

SEQ ID NO: 810 - RNA, 19 nt, artificial
  Oligomer
cucaguuuuccaaccacag

SEQ ID NO: 811 - RNA, 19 nt, artificial
  Oligomer
gagaacugcuaagacaagu

SEQ ID NO: 812 - RNA, 19 nt, artificial
  Oligomer
gucaaagaucccaagugau

SEQ ID NO: 813 - RNA, 19 nt, artificial
  Oligomer
uuugcugaugaacucagag

SEQ ID NO: 814 - RNA, 19 nt, artificial
  Oligomer
auaauaagguacaugcuac

SEQ ID NO: 815 - RNA, 19 nt, artificial
  Oligomer
acaaguguucauccucagg

SEQ ID NO: 816 - RNA, 19 nt, artificial
  Oligomer
aaguguauucaugaacagu

SEQ ID NO: 817 - RNA, 19 nt, artificial
  Oligomer
uguaaacaguucuagaugg

SEQ ID NO: 818 - RNA, 19 nt, artificial
  Oligomer
guaaacaguucuagaugga

SEQ ID NO: 819 - RNA, 19 nt, artificial
  Oligomer
ucuuacauucaugcgucug

SEQ ID NO: 820 - RNA, 19 nt, artificial
  Oligomer
guaagauacacaaaccacc

SEQ ID NO: 821 - RNA, 19 nt, artificial
  Oligomer
gucacaccacuguuaacug

SEQ ID NO: 822 - RNA, 19 nt, artificial
  Oligomer
agguacaugcuacacacac

SEQ ID NO: 823 - RNA, 19 nt, artificial
  Oligomer
auccagcuggaagccuugu

SEQ ID NO: 824 - RNA, 19 nt, artificial
  Oligomer
ccuaagccuuuguuucaug

SEQ ID NO: 825 - RNA, 19 nt, artificial
  Oligomer
acaggaaucagucccucag

SEQ ID NO: 826 - RNA, 19 nt, artificial
  Oligomer
caaugagcagcuguuccga

SEQ ID NO: 827 - RNA, 19 nt, artificial
  Oligomer
aaugagcagcuguuccgag

SEQ ID NO: 828 - RNA, 19 nt, artificial
  Oligomer
caggcgcaguaguucuuug

SEQ ID NO: 829 - RNA, 19 nt, artificial
  Oligomer
cuuacauucaugcgucugu

SEQ ID NO: 830 - RNA, 19 nt, artificial
  Oligomer
gaucagaaaaacaagauac

SEQ ID NO: 831 - RNA, 19 nt, artificial
  Oligomer
caaacacacuuggucccuu

SEQ ID NO: 832 - RNA, 19 nt, artificial
  Oligomer
caguaagauacacaaacca

SEQ ID NO: 833 - RNA, 19 nt, artificial
  Oligomer
acacacauccagcuggaag

SEQ ID NO: 834 - RNA, 19 nt, artificial
  Oligomer
guuucaugcuacaguacug

SEQ ID NO: 835 - RNA, 19 nt, artificial
  Oligomer
cgagaacugcuaagacaag

SEQ ID NO: 836 - RNA, 19 nt, artificial
  Oligomer
uuaccaacuggcuaggcau

SEQ ID NO: 837 - RNA, 19 nt, artificial
  Oligomer
caugaacagugaguaucuu

SEQ ID NO: 838 - RNA, 19 nt, artificial
  Oligomer
aaacaguucuagauggaag

SEQ ID NO: 839 - RNA, 19 nt, artificial
  Oligomer
aacaguucuagauggaaga

SEQ ID NO: 840 - RNA, 19 nt, artificial
  Oligomer
ucuagauggaagacccaga

SEQ ID NO: 841 - RNA, 19 nt, artificial
  Oligomer
aauaagguacaugcuacac

SEQ ID NO: 842 - RNA, 19 nt, artificial
  Oligomer
cacacaacucaaugagcuu

SEQ ID NO: 843 - RNA, 19 nt, artificial
  Oligomer
augaacucagagugccgga

SEQ ID NO: 844 - RNA, 19 nt, artificial
  Oligomer
gcuugaaugggugugcgaa

SEQ ID NO: 845 - RNA, 19 nt, artificial
  Oligomer
caacacuccucaaugagca

SEQ ID NO: 846 - RNA, 19 nt, artificial
  Oligomer
ucuucuugaugacucggaa

SEQ ID NO: 847 - RNA, 19 nt, artificial
  Oligomer
ugaacaucaaguguauuca

SEQ ID NO: 848 - RNA, 19 nt, artificial
  Oligomer
aguguauucaugaacagug

SEQ ID NO: 849 - RNA, 19 nt, artificial
  Oligomer
uucuagauggaagacccag

SEQ ID NO: 850 - RNA, 19 nt, artificial
  Oligomer
ugccagguguaauuuuuca

SEQ ID NO: 851 - RNA, 19 nt, artificial
  Oligomer
cacaccacuguuaacuguc

SEQ ID NO: 852 - RNA, 19 nt, artificial
  Oligomer
ugcuacacacacauccagc

SEQ ID NO: 853 - RNA, 19 nt, artificial
  Oligomer
cccucagguugaaguucaa

SEQ ID NO: 854 - RNA, 19 nt, artificial
  Oligomer
guucaacacuccucaauga

SEQ ID NO: 855 - RNA, 19 nt, artificial
  Oligomer
cuugaaugggugugcgaac

SEQ ID NO: 856 - RNA, 19 nt, artificial
  Oligomer
cacaaguguucauccucag

SEQ ID NO: 857 - RNA, 19 nt, artificial
  Oligomer
aacagugaguaucuuaucu

SEQ ID NO: 858 - RNA, 19 nt, artificial
  Oligomer
cugccagguguaauuuuuc

SEQ ID NO: 859 - RNA, 19 nt, artificial
  Oligomer
uuuucaagugucaaagauc

SEQ ID NO: 860 - RNA, 19 nt, artificial
  Oligomer
cauucaugcgucuguaaga

SEQ ID NO: 861 - RNA, 19 nt, artificial
  Oligomer
aagauagcugccuacaaca

SEQ ID NO: 862 - RNA, 19 nt, artificial
  Oligomer
uaggcauggugaggacaga

SEQ ID NO: 863 - RNA, 19 nt, artificial
  Oligomer
cuccgaucagaaaaacaag

SEQ ID NO: 864 - RNA, 19 nt, artificial
  Oligomer
accaguaagauacacaaac

SEQ ID NO: 865 - RNA, 19 nt, artificial
  Oligomer
cccuaagccuuuguuucau

SEQ ID NO: 866 - RNA, 19 nt, artificial
  Oligomer
ccaaaaguucagucgucuc

SEQ ID NO: 867 - RNA, 19 nt, artificial
  Oligomer
gccagguguaauuuuucaa

SEQ ID NO: 868 - RNA, 19 nt, artificial
  Oligomer
gugucaaagaucccaagug

SEQ ID NO: 869 - RNA, 19 nt, artificial
  Oligomer
cucuggaugucacaccacu

SEQ ID NO: 870 - RNA, 19 nt, artificial
  Oligomer
acaccacuguuaacuguca

SEQ ID NO: 871 - RNA, 19 nt, artificial
  Oligomer
uguuaacugucaguaacaa

SEQ ID NO: 872 - RNA, 19 nt, artificial
  Oligomer
aguuggcggagcuaaacag

SEQ ID NO: 873 - RNA, 19 nt, artificial
  Oligomer
aacuggcuaggcaucagca

SEQ ID NO: 874 - RNA, 19 nt, artificial
  Oligomer
cagugaguaucuuaucuuc

SEQ ID NO: 875 - RNA, 19 nt, artificial
  Oligomer
guguaauuuuucaaguguc

SEQ ID NO: 876 - RNA, 19 nt, artificial
  Oligomer
ucccaagugaucccugaca

SEQ ID NO: 877 - RNA, 19 nt, artificial
  Oligomer
ccuuccuacucuuacauuc

SEQ ID NO: 878 - RNA, 19 nt, artificial
  Oligomer
uguaagauagcugccuaca

SEQ ID NO: 879 - RNA, 19 nt, artificial
  Oligomer
ccuucagaccaguaagaua

SEQ ID NO: 880 - RNA, 19 nt, artificial
  Oligomer
ucagaccaguaagauacac

SEQ ID NO: 881 - RNA, 19 nt, artificial
  Oligomer
aguaagauacacaaaccac

SEQ ID NO: 882 - RNA, 19 nt, artificial
  Oligomer
augucacaccacuguuaac

SEQ ID NO: 883 - RNA, 19 nt, artificial
  Oligomer
ugcugaugaacucagagug

SEQ ID NO: 884 - RNA, 19 nt, artificial
  Oligomer
cacccgcacacaacucaau

SEQ ID NO: 885 - RNA, 19 nt, artificial
  Oligomer
cccgcacacaacucaauga

SEQ ID NO: 886 - RNA, 19 nt, artificial
  Oligomer
ccgcacacaacucaaugag

SEQ ID NO: 887 - RNA, 19 nt, artificial
  Oligomer
cuuccugggaaacacuauu

SEQ ID NO: 888 - RNA, 19 nt, artificial
  Oligomer
gucagcgagaacugcuaag

SEQ ID NO: 889 - RNA, 19 nt, artificial
  Oligomer
cucagguugaaguucaaca

SEQ ID NO: 890 - RNA, 19 nt, artificial
  Oligomer
ugaguaucuuaucuucaug

SEQ ID NO: 891 - RNA, 19 nt, artificial
  Oligomer
ccagguguaauuuuucaag

SEQ ID NO: 892 - RNA, 19 nt, artificial
  Oligomer
aacaggucaguagugaugc

SEQ ID NO: 893 - RNA, 19 nt, artificial
  Oligomer
ugcuccgaucagaaaaaca

SEQ ID NO: 894 - RNA, 19 nt, artificial
  Oligomer
cgaucagaaaaacaagaua

SEQ ID NO: 895 - RNA, 19 nt, artificial
  Oligomer
aacaacaaacacacuuggu

SEQ ID NO: 896 - RNA, 19 nt, artificial
  Oligomer
caacucaaugagcuuccug

SEQ ID NO: 897 - RNA, 19 nt, artificial
  Oligomer
agcuuccugggaaacacua

SEQ ID NO: 898 - RNA, 19 nt, artificial
  Oligomer
ugaaguucaacacuccuca

SEQ ID NO: 899 - RNA, 19 nt, artificial
  Oligomer
aacacuccucaaugagcag

SEQ ID NO: 900 - RNA, 19 nt, artificial
  Oligomer
acugcuaagacaagugcgu

SEQ ID NO: 901 - RNA, 19 nt, artificial
  Oligomer
agugaguaucuuaucuuca

SEQ ID NO: 902 - RNA, 19 nt, artificial
  Oligomer
gcugccagguguaauuuuu

SEQ ID NO: 903 - RNA, 19 nt, artificial
  Oligomer
caagugucaaagaucccaa

SEQ ID NO: 904 - RNA, 19 nt, artificial
  Oligomer
ucaguagugaugcuccgau

SEQ ID NO: 905 - RNA, 19 nt, artificial
  Oligomer
aacaaacaacaaacacacu

SEQ ID NO: 906 - RNA, 19 nt, artificial
  Oligomer
uaagauacacaaaccaccu

SEQ ID NO: 907 - RNA, 19 nt, artificial
  Oligomer
gauacacaaaccaccucca

SEQ ID NO: 908 - RNA, 19 nt, artificial
  Oligomer
ucuggaugucacaccacug

SEQ ID NO: 909 - RNA, 19 nt, artificial
  Oligomer
cuacacacacauccagcug

SEQ ID NO: 910 - RNA, 19 nt, artificial
  Oligomer
uuucaugcuacaguacuga

SEQ ID NO: 911 - RNA, 19 nt, artificial
  Oligomer
cgcacacaacucaaugagc

SEQ ID NO: 912 - RNA, 19 nt, artificial
  Oligomer
uuagguggcugccucaguu

SEQ ID NO: 913 - RNA, 19 nt, artificial
  Oligomer
uuuuccaaccacaggaauc

SEQ ID NO: 914 - RNA, 19 nt, artificial
  Oligomer
uugaaguucaacacuccuc

SEQ ID NO: 915 - RNA, 19 nt, artificial
  Oligomer
uguacagcuucuucuugau

SEQ ID NO: 916 - RNA, 19 nt, artificial
  Oligomer
ucaaguguauucaugaaca

SEQ ID NO: 917 - RNA, 19 nt, artificial
  Oligomer
acucugcaguacacgaugg

SEQ ID NO: 918 - RNA, 19 nt, artificial
  Oligomer
cucuuacauucaugcgucu

SEQ ID NO: 919 - RNA, 19 nt, artificial
  Oligomer
ucaugcgucuguaagauag

SEQ ID NO: 920 - RNA, 19 nt, artificial
  Oligomer
uagugaugcuccgaucaga

SEQ ID NO: 921 - RNA, 19 nt, artificial
  Oligomer
agggcguuugcugaugaac

SEQ ID NO: 922 - RNA, 19 nt, artificial
  Oligomer
cccuucagaccaguaagau

SEQ ID NO: 923 - RNA, 19 nt, artificial
  Oligomer
auacacaaaccaccuccac

SEQ ID NO: 924 - RNA, 19 nt, artificial
  Oligomer
ccuuuguuucaugcuacag

SEQ ID NO: 925 - RNA, 19 nt, artificial
  Oligomer
ucagcgagaacugcuaaga

SEQ ID NO: 926 - RNA, 19 nt, artificial
  Oligomer
ccucagguugaaguucaac

SEQ ID NO: 927 - RNA, 19 nt, artificial
  Oligomer
acacuccucaaugagcagc

SEQ ID NO: 928 - RNA, 19 nt, artificial
  Oligomer
gcaucagguuggcacacaa

SEQ ID NO: 929 - RNA, 19 nt, artificial
  Oligomer
acacacuuggucccuucag

SEQ ID NO: 930 - RNA, 19 nt, artificial
  Oligomer
ucccuucagaccaguaaga

SEQ ID NO: 931 - RNA, 19 nt, artificial
  Oligomer
cacaacucaaugagcuucc

SEQ ID NO: 932 - RNA, 19 nt, artificial
  Oligomer
ggucagcgagaacugcuaa

SEQ ID NO: 933 - RNA, 19 nt, artificial
  Oligomer
guucagucgucucugucuu

SEQ ID NO: 934 - RNA, 19 nt, artificial
  Oligomer
cuagauggaagacccagau

SEQ ID NO: 935 - RNA, 19 nt, artificial
  Oligomer
uucaagugucaaagauccc

SEQ ID NO: 936 - RNA, 19 nt, artificial
  Oligomer
caaagaucccaagugaucc

SEQ ID NO: 937 - RNA, 19 nt, artificial
  Oligomer
auucaugcgucuguaagau

SEQ ID NO: 938 - RNA, 19 nt, artificial
  Oligomer
guaagauagcugccuacaa

SEQ ID NO: 939 - RNA, 19 nt, artificial
  Oligomer
agcugcucucuggauguca

SEQ ID NO: 940 - RNA, 19 nt, artificial
  Oligomer
gcuuccugggaaacacuau

SEQ ID NO: 941 - RNA, 19 nt, artificial
  Oligomer
uccgagcuguacagcuucu

SEQ ID NO: 942 - RNA, 19 nt, artificial
  Oligomer
cuugaacaucaaguguauu

SEQ ID NO: 943 - RNA, 19 nt, artificial
  Oligomer
cuuaucuucauguaaacag

SEQ ID NO: 944 - RNA, 19 nt, artificial
  Oligomer
gcucaacucugcaguacac

SEQ ID NO: 945 - RNA, 19 nt, artificial
  Oligomer
ucaaagaucccaagugauc

SEQ ID NO: 946 - RNA, 19 nt, artificial
  Oligomer
aaaggcuaggcauggugag

SEQ ID NO: 947 - RNA, 19 nt, artificial
  Oligomer
agcugccuacaacagguca

SEQ ID NO: 948 - RNA, 19 nt, artificial
  Oligomer
gucaguagugaugcuccga

SEQ ID NO: 949 - RNA, 19 nt, artificial
  Oligomer
gaugucacaccacuguuaa

SEQ ID NO: 950 - RNA, 19 nt, artificial
  Oligomer
uccugggaaacacuauucc

SEQ ID NO: 951 - RNA, 19 nt, artificial
  Oligomer
ggcugccucaguuuuccaa

SEQ ID NO: 952 - RNA, 19 nt, artificial
  Oligomer
ccucaguuuuccaaccaca

SEQ ID NO: 953 - RNA, 19 nt, artificial
  Oligomer
uuuccaaccacaggaauca

SEQ ID NO: 954 - RNA, 19 nt, artificial
  Oligomer
uccaaccacaggaaucagu

SEQ ID NO: 955 - RNA, 19 nt, artificial
  Oligomer
cacaggaaucagucccuca

SEQ ID NO: 956 - RNA, 19 nt, artificial
  Oligomer
gcgagaacugcuaagacaa

SEQ ID NO: 957 - RNA, 19 nt, artificial
  Oligomer
cacuccucaaugagcagcu

SEQ ID NO: 958 - RNA, 19 nt, artificial
  Oligomer
ccaggcgcaguaguucuuu

SEQ ID NO: 959 - RNA, 19 nt, artificial
  Oligomer
caucagguuggcacacaag

SEQ ID NO: 960 - RNA, 19 nt, artificial
  Oligomer
guuggcacacaaguguuca

SEQ ID NO: 961 - RNA, 19 nt, artificial
  Oligomer
uugcauaggucuuaauacu

SEQ ID NO: 962 - RNA, 19 nt, artificial
  Oligomer
aggucuuaauacuugaaca

SEQ ID NO: 963 - RNA, 19 nt, artificial
  Oligomer
gucuuaauacuugaacauc

SEQ ID NO: 964 - RNA, 19 nt, artificial
  Oligomer
uguucauccucagggucac

SEQ ID NO: 965 - RNA, 19 nt, artificial
  Oligomer
aguucuagauggaagaccc

SEQ ID NO: 966 - RNA, 19 nt, artificial
  Oligomer
acaaacacacuuggucccu

SEQ ID NO: 967 - RNA, 19 nt, artificial
  Oligomer
gaccaguaagauacacaaa

SEQ ID NO: 968 - RNA, 19 nt, artificial
  Oligomer
uucaacacuccucaaugag

SEQ ID NO: 969 - RNA, 19 nt, artificial
  Oligomer
ucaacacuccucaaugagc

SEQ ID NO: 970 - RNA, 19 nt, artificial
  Oligomer
gaguuggcggagcuaaaca

SEQ ID NO: 971 - RNA, 19 nt, artificial
  Oligomer
uuggcacacaaguguucau

SEQ ID NO: 972 - RNA, 19 nt, artificial
  Oligomer
uggcacacaaguguucauc

SEQ ID NO: 973 - RNA, 19 nt, artificial
  Oligomer
gcauaggucuuaauacuug

SEQ ID NO: 974 - RNA, 19 nt, artificial
  Oligomer
gguguaauuuuucaagugu

SEQ ID NO: 975 - RNA, 19 nt, artificial
  Oligomer
ucuguaagauagcugccua

SEQ ID NO: 976 - RNA, 19 nt, artificial
  Oligomer
auagcugccuacaacaggu

SEQ ID NO: 977 - RNA, 19 nt, artificial
  Oligomer
cuacaacaggucaguagug

SEQ ID NO: 978 - RNA, 19 nt, artificial
  Oligomer
uggucccuucagaccagua

SEQ ID NO: 979 - RNA, 19 nt, artificial
  Oligomer
gguacaugcuacacacaca

SEQ ID NO: 980 - RNA, 19 nt, artificial
  Oligomer
cacacacauccagcuggaa

SEQ ID NO: 981 - RNA, 19 nt, artificial
  Oligomer
gcacacaacucaaugagcu

SEQ ID NO: 982 - RNA, 19 nt, artificial
  Oligomer
aaguucaacacuccucaau

SEQ ID NO: 983 - RNA, 19 nt, artificial
  Oligomer
cuucuucuugaugacucgg

SEQ ID NO: 984 - RNA, 19 nt, artificial
  Oligomer
caguaguucuuugcccacc

SEQ ID NO: 985 - RNA, 19 nt, artificial
  Oligomer
ugcauaggucuuaauacuu

SEQ ID NO: 986 - RNA, 19 nt, artificial
  Oligomer
ggaaggcuuaaacgcagcu

SEQ ID NO: 987 - RNA, 19 nt, artificial
  Oligomer
aaggcuuaaacgcagcugc

SEQ ID NO: 988 - RNA, 19 nt, artificial
  Oligomer
agugucaaagaucccaagu

SEQ ID NO: 989 - RNA, 19 nt, artificial
  Oligomer
gccuacaacaggucaguag

SEQ ID NO: 990 - RNA, 19 nt, artificial
  Oligomer
uucagaccaguaagauaca

SEQ ID NO: 991 - RNA, 19 nt, artificial
  Oligomer
caccacuguuaacugucag

SEQ ID NO: 992 - RNA, 19 nt, artificial
  Oligomer
accacuguuaacugucagu

SEQ ID NO: 993 - RNA, 19 nt, artificial
  Oligomer
acacacacauccagcugga

SEQ ID NO: 994 - RNA, 19 nt, artificial
  Oligomer
gccuuuguuucaugcuaca

SEQ ID NO: 995 - RNA, 19 nt, artificial
  Oligomer
ucaugcuacaguacugagg

SEQ ID NO: 996 - RNA, 19 nt, artificial
  Oligomer
acucaaugagcuuccuggg

SEQ ID NO: 997 - RNA, 19 nt, artificial
  Oligomer
caaugagcuuccugggaaa

SEQ ID NO: 998 - RNA, 19 nt, artificial
  Oligomer
guugaaguucaacacuccu

SEQ ID NO: 999 - RNA, 19 nt, artificial
  Oligomer
gcuaagacaagugcguccu

SEQ ID NO: 1000 - RNA, 19 nt, artificial
  Oligomer
ucacugagcagcucgaagu

SEQ ID NO: 1001 - RNA, 19 nt, artificial
  Oligomer
agguguaauuuuucaagug

SEQ ID NO: 1002 - RNA, 19 nt, artificial
  Oligomer
cuaagacaagugcguccug

SEQ ID NO: 1003 - RNA, 19 nt, artificial
  Oligomer
gaucccaagugaucccuga

SEQ ID NO: 1004 - RNA, 19 nt, artificial
  Oligomer
ccuacaacaggucaguagu

SEQ ID NO: 1005 - RNA, 19 nt, artificial
  Oligomer
acaacaggucaguagugau

SEQ ID NO: 1006 - RNA, 19 nt, artificial
  Oligomer
augcuccgaucagaaaaac

SEQ ID NO: 1007 - RNA, 19 nt, artificial
  Oligomer
cacacuuggucccuucaga

SEQ ID NO: 1008 - RNA, 19 nt, artificial
  Oligomer
caugcuacaguacugaggg

SEQ ID NO: 1009 - RNA, 19 nt, artificial
  Oligomer
agaacugcuaagacaagug

SEQ ID NO: 1010 - RNA, 19 nt, artificial
  Oligomer
ugaugacucggaagccagu

SEQ ID NO: 1011 - RNA, 19 nt, artificial
  Oligomer
cuuaccaacuggcuaggca

SEQ ID NO: 1012 - RNA, 19 nt, artificial
  Oligomer
acuugaacaucaaguguau

SEQ ID NO: 1013 - RNA, 19 nt, artificial
  Oligomer
caaguguauucaugaacag

SEQ ID NO: 1014 - RNA, 19 nt, artificial
  Oligomer
caacucugcaguacacgau

SEQ ID NO: 1015 - RNA, 19 nt, artificial
  Oligomer
cagcugccagguguaauuu

SEQ ID NO: 1016 - RNA, 19 nt, artificial
  Oligomer
aaagaucccaagugauccc

SEQ ID NO: 1017 - RNA, 19 nt, artificial
  Oligomer
agaucccaagugaucccug

SEQ ID NO: 1018 - RNA, 19 nt, artificial
  Oligomer
cuuccuacucuuacauuca

SEQ ID NO: 1019 - RNA, 19 nt, artificial
  Oligomer
caaaacaaacaacaaacac

SEQ ID NO: 1020 - RNA, 19 nt, artificial
  Oligomer
uugcugaugaacucagagu

SEQ ID NO: 1021 - RNA, 19 nt, artificial
  Oligomer
aagguacaugcuacacaca

SEQ ID NO: 1022 - RNA, 19 nt, artificial
  Oligomer
cugccucaguuuuccaacc

SEQ ID NO: 1023 - RNA, 19 nt, artificial
  Oligomer
uuccaaccacaggaaucag

SEQ ID NO: 1024 - RNA, 19 nt, artificial
  Oligomer
aggaaucagucccucagcu

SEQ ID NO: 1025 - RNA, 19 nt, artificial
  Oligomer
uucuuugcccaccuggcuu

SEQ ID NO: 1026 - RNA, 19 nt, artificial
  Oligomer
cauaggucuuaauacuuga

SEQ ID NO: 1027 - RNA, 19 nt, artificial
  Oligomer
caucaaguguauucaugaa

SEQ ID NO: 1028 - RNA, 19 nt, artificial
  Oligomer
auggaagacccagauggca

SEQ ID NO: 1029 - RNA, 19 nt, artificial
  Oligomer
cagguguaauuuuucaagu

SEQ ID NO: 1030 - RNA, 19 nt, artificial
  Oligomer
uuccuacucuuacauucau

SEQ ID NO: 1031 - RNA, 19 nt, artificial
  Oligomer
aggucaguagugaugcucc

SEQ ID NO: 1032 - RNA, 19 nt, artificial
  Oligomer
ccacuguuaacugucagua

SEQ ID NO: 1033 - RNA, 19 nt, artificial
  Oligomer
augcuacacacacauccag

SEQ ID NO: 1034 - RNA, 19 nt, artificial
  Oligomer
acauccagcuggaagccuu

SEQ ID NO: 1035 - RNA, 19 nt, artificial
  Oligomer
ugagcuuccugggaaacac

SEQ ID NO: 1036 - RNA, 19 nt, artificial
  Oligomer
uuccugggaaacacuauuc

SEQ ID NO: 1037 - RNA, 19 nt, artificial
  Oligomer
gccucaguuuuccaaccac

SEQ ID NO: 1038 - RNA, 19 nt, artificial
  Oligomer
ucaguuuuccaaccacagg

SEQ ID NO: 1039 - RNA, 19 nt, artificial
  Oligomer
aaccacaggaaucaguccc

SEQ ID NO: 1040 - RNA, 19 nt, artificial
  Oligomer
accacaggaaucagucccu

SEQ ID NO: 1041 - RNA, 19 nt, artificial
  Oligomer
ggcacacaaguguucaucc

SEQ ID NO: 1042 - RNA, 19 nt, artificial
  Oligomer
ggucuuaauacuugaacau

SEQ ID NO: 1043 - RNA, 19 nt, artificial
  Oligomer
uccagguaagccgugucuu

SEQ ID NO: 1044 - RNA, 19 nt, artificial
  Oligomer
uuacauucaugcgucugua

SEQ ID NO: 1045 - RNA, 19 nt, artificial
  Oligomer
aagccacuguugcugcugu

SEQ ID NO: 1046 - RNA, 19 nt, artificial
  Oligomer
gcgucuguaagauagcugc

SEQ ID NO: 1047 - RNA, 19 nt, artificial
  Oligomer
ccgaucagaaaaacaagau

SEQ ID NO: 1048 - RNA, 19 nt, artificial
  Oligomer
cugcucucuggaugucaca

SEQ ID NO: 1049 - RNA, 19 nt, artificial
  Oligomer
uacaugcuacacacacauc

SEQ ID NO: 1050 - RNA, 19 nt, artificial
  Oligomer
uccagcuggaagccuuguu

SEQ ID NO: 1051 - RNA, 19 nt, artificial
  Oligomer
agccuuuguuucaugcuac

SEQ ID NO: 1052 - RNA, 19 nt, artificial
  Oligomer
gcuucuucuugaugacucg

SEQ ID NO: 1053 - RNA, 19 nt, artificial
  Oligomer
accaacuggcuaggcauca

SEQ ID NO: 1054 - RNA, 19 nt, artificial
  Oligomer
gaacaucaaguguauucau

SEQ ID NO: 1055 - RNA, 19 nt, artificial
  Oligomer
cccuuccuacucuuacauu

SEQ ID NO: 1056 - RNA, 19 nt, artificial
  Oligomer
acucuuacauucaugcguc

SEQ ID NO: 1057 - RNA, 19 nt, artificial
  Oligomer
ugccuacaacaggucagua

SEQ ID NO: 1058 - RNA, 19 nt, artificial
  Oligomer
acacuuggucccuucagac

SEQ ID NO: 1059 - RNA, 19 nt, artificial
  Oligomer
guuaacugucaguaacaaa

SEQ ID NO: 1060 - RNA, 19 nt, artificial
  Oligomer
uaagccuuuguuucaugcu

SEQ ID NO: 1061 - RNA, 19 nt, artificial
  Oligomer
cuuuguuucaugcuacagu

SEQ ID NO: 1062 - RNA, 19 nt, artificial
  Oligomer
uguuucaugcuacaguacu

SEQ ID NO: 1063 - RNA, 19 nt, artificial
  Oligomer
cucaaugagcagcuguucc

SEQ ID NO: 1064 - RNA, 19 nt, artificial
  Oligomer
agcuucuucuugaugacuc

SEQ ID NO: 1065 - RNA, 19 nt, artificial
  Oligomer
uucuucuugaugacucgga

SEQ ID NO: 1066 - RNA, 19 nt, artificial
  Oligomer
uugaugacucggaagccag

SEQ ID NO: 1067 - RNA, 19 nt, artificial
  Oligomer
cacacaaguguucauccuc

SEQ ID NO: 1068 - RNA, 19 nt, artificial
  Oligomer
gugaguaucuuaucuucau

SEQ ID NO: 1069 - RNA, 19 nt, artificial
  Oligomer
agcucaacucugcaguaca

SEQ ID NO: 1070 - RNA, 19 nt, artificial
  Oligomer
aagaucccaagugaucccu

SEQ ID NO: 1071 - RNA, 19 nt, artificial
  Oligomer
aagugaucccugacaccca

SEQ ID NO: 1072 - RNA, 19 nt, artificial
  Oligomer
augcgucuguaagauagcu

SEQ ID NO: 1073 - RNA, 19 nt, artificial
  Oligomer
cugccuacaacaggucagu

SEQ ID NO: 1074 - RNA, 19 nt, artificial
  Oligomer
ugaugcuccgaucagaaaa

SEQ ID NO: 1075 - RNA, 19 nt, artificial
  Oligomer
acaacucaaugagcuuccu

SEQ ID NO: 1076 - RNA, 19 nt, artificial
  Oligomer
ccgagcuguacagcuucuu

SEQ ID NO: 1077 - RNA, 19 nt, artificial
  Oligomer
gagaguuggcggagcuaaa

SEQ ID NO: 1078 - RNA, 19 nt, artificial
  Oligomer
aggcgcaguaguucuuugc

SEQ ID NO: 1079 - RNA, 19 nt, artificial
  Oligomer
gguuggcacacaaguguuc

SEQ ID NO: 1080 - RNA, 19 nt, artificial
  Oligomer
guguucauccucaggguca

SEQ ID NO: 1081 - RNA, 19 nt, artificial
  Oligomer
guucauccucagggucacu

SEQ ID NO: 1082 - RNA, 19 nt, artificial
  Oligomer
acaguucuagauggaagac

SEQ ID NO: 1083 - RNA, 19 nt, artificial
  Oligomer
gcagcugccagguguaauu

SEQ ID NO: 1084 - RNA, 19 nt, artificial
  Oligomer
ccaguaagauacacaaacc

SEQ ID NO: 1085 - RNA, 19 nt, artificial
  Oligomer
caugcuacacacacaucca

SEQ ID NO: 1086 - RNA, 19 nt, artificial
  Oligomer
agguggcugccucaguuuu

SEQ ID NO: 1087 - RNA, 19 nt, artificial
  Oligomer
aaucagucccucagcuccu

SEQ ID NO: 1088 - RNA, 19 nt, artificial
  Oligomer
agaguuggcggagcuaaac

SEQ ID NO: 1089 - RNA, 19 nt, artificial
  Oligomer
cgcaguaguucuuugccca

SEQ ID NO: 1090 - RNA, 19 nt, artificial
  Oligomer
cugcuaagacaagugcguc

SEQ ID NO: 1091 - RNA, 19 nt, artificial
  Oligomer
aauacuugaacaucaagug

SEQ ID NO: 1092 - RNA, 19 nt, artificial
  Oligomer
ucaugaacagugaguaucu

SEQ ID NO: 1093 - RNA, 19 nt, artificial
  Oligomer
ccagcucaacucugcagua

SEQ ID NO: 1094 - RNA, 19 nt, artificial
  Oligomer
cuacucuuacauucaugcg

SEQ ID NO: 1095 - RNA, 19 nt, artificial
  Oligomer
gaugcuccgaucagaaaaa

SEQ ID NO: 1096 - RNA, 19 nt, artificial
  Oligomer
ggucccuucagaccaguaa

SEQ ID NO: 1097 - RNA, 19 nt, artificial
  Oligomer
cguuugcugaugaacucag

SEQ ID NO: 1098 - RNA, 19 nt, artificial
  Oligomer
cucucuggaugucacacca

SEQ ID NO: 1099 - RNA, 19 nt, artificial
  Oligomer
cuggaugucacaccacugu

SEQ ID NO: 1100 - RNA, 19 nt, artificial
  Oligomer
uucaugcuacaguacugag

SEQ ID NO: 1101 - RNA, 19 nt, artificial
  Oligomer
gagcuuccugggaaacacu

SEQ ID NO: 1102 - RNA, 19 nt, artificial
  Oligomer
caaccacaggaaucagucc

SEQ ID NO: 1103 - RNA, 19 nt, artificial
  Oligomer
aaaaguucagucgucucug

SEQ ID NO: 1104 - RNA, 19 nt, artificial
  Oligomer
agguugaaguucaacacuc

SEQ ID NO: 1105 - RNA, 19 nt, artificial
  Oligomer
ccucaaugagcagcuguuc

SEQ ID NO: 1106 - RNA, 19 nt, artificial
  Oligomer
uuccgagcuguacagcuuc

SEQ ID NO: 1107 - RNA, 19 nt, artificial
  Oligomer
cgagcuguacagcuucuuc

SEQ ID NO: 1108 - RNA, 19 nt, artificial
  Oligomer
uugaaugggugugcgaacc

SEQ ID NO: 1109 - RNA, 19 nt, artificial
  Oligomer
ugcgucuguaagauagcug

SEQ ID NO: 1110 - RNA, 19 nt, artificial
  Oligomer
gauagcugccuacaacagg

SEQ ID NO: 1111 - RNA, 19 nt, artificial
  Oligomer
gggcguuugcugaugaacu

SEQ ID NO: 1112 - RNA, 19 nt, artificial
  Oligomer
uuggucccuucagaccagu

SEQ ID NO: 1113 - RNA, 19 nt, artificial
  Oligomer
guuugcugaugaacucaga

SEQ ID NO: 1114 - RNA, 19 nt, artificial
  Oligomer
gcugccucaguuuuccaac

SEQ ID NO: 1115 - RNA, 19 nt, artificial
  Oligomer
caguuuuccaaccacagga

SEQ ID NO: 1116 - RNA, 19 nt, artificial
  Oligomer
cagcgagaacugcuaagac

SEQ ID NO: 1117 - RNA, 19 nt, artificial
  Oligomer
ucagguugaaguucaacac

SEQ ID NO: 1118 - RNA, 19 nt, artificial
  Oligomer
gguugaaguucaacacucc

SEQ ID NO: 1119 - RNA, 19 nt, artificial
  Oligomer
agcuguuccgagcuguaca

SEQ ID NO: 1120 - RNA, 19 nt, artificial
  Oligomer
uguuccgagcuguacagcu

SEQ ID NO: 1121 - RNA, 19 nt, artificial
  Oligomer
acagcuucuucuugaugac

SEQ ID NO: 1122 - RNA, 19 nt, artificial
  Oligomer
aacugcuaagacaagugcg

SEQ ID NO: 1123 - RNA, 19 nt, artificial
  Oligomer
ucauccucagggucacuga

SEQ ID NO: 1124 - RNA, 19 nt, artificial
  Oligomer
cucaaugagcuuccuggga

SEQ ID NO: 1125 - RNA, 19 nt, artificial
  Oligomer
agcgagaacugcuaagaca

SEQ ID NO: 1126 - RNA, 19 nt, artificial
  Oligomer
cuccucaaugagcagcugu

SEQ ID NO: 1127 - RNA, 19 nt, artificial
  Oligomer
guuccgagcuguacagcuu

SEQ ID NO: 1128 - RNA, 19 nt, artificial
  Oligomer
cuggcuuaccaacuggcua

SEQ ID NO: 1129 - RNA, 19 nt, artificial
  Oligomer
guauucaugaacagugagu

SEQ ID NO: 1130 - RNA, 19 nt, artificial
  Oligomer
auucaugaacagugaguau

SEQ ID NO: 1131 - RNA, 19 nt, artificial
  Oligomer
cagcucaacucugcaguac

SEQ ID NO: 1132 - RNA, 19 nt, artificial
  Oligomer
gaaggcuuaaacgcagcug

SEQ ID NO: 1133 - RNA, 19 nt, artificial
  Oligomer
gucccuucagaccaguaag

SEQ ID NO: 1134 - RNA, 19 nt, artificial
  Oligomer
augagcuuccugggaaaca

SEQ ID NO: 1135 - RNA, 19 nt, artificial
  Oligomer
gcuguacagcuucuucuug

SEQ ID NO: 1136 - RNA, 19 nt, artificial
  Oligomer
caggucaguagugaugcuc

SEQ ID NO: 1137 - RNA, 19 nt, artificial
  Oligomer
aguagugaugcuccgauca

SEQ ID NO: 1138 - RNA, 19 nt, artificial
  Oligomer
cagggcguuugcugaugaa

SEQ ID NO: 1139 - RNA, 19 nt, artificial
  Oligomer
ggaugucacaccacuguua

SEQ ID NO: 1140 - RNA, 19 nt, artificial
  Oligomer
cuguuaacugucaguaaca

SEQ ID NO: 1141 - RNA, 19 nt, artificial
  Oligomer
gcuacacacacauccagcu

SEQ ID NO: 1142 - RNA, 19 nt, artificial
  Oligomer
gcaguaguucuuugcccac

SEQ ID NO: 1143 - RNA, 19 nt, artificial
  Oligomer
ucagguuggcacacaagug

SEQ ID NO: 1144 - RNA, 19 nt, artificial
  Oligomer
caugcgucuguaagauagc

SEQ ID NO: 1145 - RNA, 19 nt, artificial
  Oligomer
aagccuuuguuucaugcua

SEQ ID NO: 1146 - RNA, 19 nt, artificial
  Oligomer
gaaguucaacacuccucaa

SEQ ID NO: 1147 - RNA, 19 nt, artificial
  Oligomer
cuugaugacucggaagcca

SEQ ID NO: 1148 - RNA, 19 nt, artificial
  Oligomer
gugaugcuccgaucagaaa

SEQ ID NO: 1149 - RNA, 19 nt, artificial
  Oligomer
acuuggucccuucagacca

SEQ ID NO: 1150 - RNA, 19 nt, artificial
  Oligomer
cagucgucucugucuugga

SEQ ID NO: 1151 - RNA, 19 nt, artificial
  Oligomer
acuccucaaugagcagcug

SEQ ID NO: 1152 - RNA, 19 nt, artificial
  Oligomer
guucuagauggaagaccca

SEQ ID NO: 1153 - RNA, 19 nt, artificial
  Oligomer
uagcugccuacaacagguc

SEQ ID NO: 1154 - RNA, 19 nt, artificial
  Oligomer
ucaaugagcuuccugggaa

SEQ ID NO: 1155 - RNA, 19 nt, artificial
  Oligomer
gagcuguacagcuucuucu

SEQ ID NO: 1156 - RNA, 19 nt, artificial
  Oligomer
cagcuucuucuugaugacu

SEQ ID NO: 1157 - RNA, 19 nt, artificial
  Oligomer
uggcuuaccaacuggcuag

SEQ ID NO: 1158 - RNA, 19 nt, artificial
  Oligomer
gcacacaaguguucauccu

SEQ ID NO: 1159 - RNA, 19 nt, artificial
  Oligomer
gucuguaagauagcugccu

SEQ ID NO: 1160 - RNA, 19 nt, artificial
  Oligomer
guuuuccaaccacaggaau

SEQ ID NO: 1161 - RNA, 19 nt, artificial
  Oligomer
cuucuugaugacucggaag

SEQ ID NO: 1162 - RNA, 19 nt, artificial
  Oligomer
aaguguucauccucagggu

SEQ ID NO: 1163 - RNA, 19 nt, artificial
  Oligomer
agguaagccgugucuuccu

SEQ ID NO: 1164 - RNA, 19 nt, artificial
  Oligomer
uacauucaugcgucuguaa

SEQ ID NO: 1165 - RNA, 19 nt, artificial
  Oligomer
ucuugaugacucggaagcc

SEQ ID NO: 1166 - RNA, 19 nt, artificial
  Oligomer
cagguuggcacacaagugu

SEQ ID NO: 1167 - RNA, 19 nt, artificial
  Oligomer
uacuugaacaucaagugua

SEQ ID NO: 1168 - RNA, 19 nt, artificial
  Oligomer
agcugccagguguaauuuu

SEQ ID NO: 1169 - RNA, 19 nt, artificial
  Oligomer
aguaguucuuugcccaccu

SEQ ID NO: 1170 - RNA, 19 nt, artificial
  Oligomer
guaguucuuugcccaccug

SEQ ID NO: 1171 - RNA, 19 nt, artificial
  Oligomer
auacuugaacaucaagugu

SEQ ID NO: 1172 - RNA, 19 nt, artificial
  Oligomer
aguguucauccucaggguc

SEQ ID NO: 1173 - RNA, 19 nt, artificial
  Oligomer
uucaugcgucuguaagaua

SEQ ID NO: 1174 - RNA, 19 nt, artificial
  Oligomer
gcugaugaacucagagugc

SEQ ID NO: 1175 - RNA, 19 nt, artificial
  Oligomer
uuuguuucaugcuacagua

SEQ ID NO: 1176 - RNA, 19 nt, artificial
  Oligomer
uuguuucaugcuacaguac

SEQ ID NO: 1177 - RNA, 19 nt, artificial
  Oligomer
uggcugccucaguuuucca

SEQ ID NO: 1178 - RNA, 19 nt, artificial
  Oligomer
aguuuuccaaccacaggaa

SEQ ID NO: 1179 - RNA, 19 nt, artificial
  Oligomer
agcuguacagcuucuucuu

SEQ ID NO: 1180 - RNA, 19 nt, artificial
  Oligomer
guguauucaugaacaguga

SEQ ID NO: 1181 - RNA, 19 nt, artificial
  Oligomer
guagugaugcuccgaucag

SEQ ID NO: 1182 - RNA, 19 nt, artificial
  Oligomer
acuguuaacugucaguaac

SEQ ID NO: 1183 - RNA, 19 nt, artificial
  Oligomer
acaggucaguagugaugcu

SEQ ID NO: 1184 - RNA, 19 nt, artificial
  Oligomer
gcguuugcugaugaacuca

SEQ ID NO: 1185 - RNA, 19 nt, artificial
  Oligomer
cugaugaacucagagugcc

SEQ ID NO: 1186 - RNA, 19 nt, artificial
  Oligomer
agguuggcacacaaguguu

SEQ ID NO: 1187 - RNA, 19 nt, artificial
  Oligomer
cacuguuaacugucaguaa

SEQ ID NO: 1188 - RNA, 19 nt, artificial
  Oligomer
ccugggaaacacuauuccc

SEQ ID NO: 1189 - RNA, 19 nt, artificial
  Oligomer
ugccucaguuuuccaacca

SEQ ID NO: 1190 - RNA, 19 nt, artificial
  Oligomer
cgucuguaagauagcugcc

SEQ ID NO: 1191 - RNA, 19 nt, artificial
  Oligomer
uggaugucacaccacuguu

SEQ ID NO: 1192 - RNA, 19 nt, artificial
  Oligomer
ugcaucagguuggcacaca

SEQ ID NO: 1193 - RNA, 19 nt, artificial
  Oligomer
uguauucaugaacagugag

SEQ ID NO: 1194 - RNA, 19 nt, artificial
  Oligomer
ggcguuugcugaugaacuc

SEQ ID NO: 1195 - RNA, 19 nt, artificial
  Oligomer
cagguugaaguucaacacu

SEQ ID NO: 1196 - RNA, 19 nt, Artificial
  Oligomer
ucucuggaugucacaccac

SEQ ID NO: 1197 - RNA, 21 nt, artificial
  Oligomer
gcaugaaacaaaggcuuaggg

SEQ ID NO: 1198 - RNA, 21 nt, artificial
  Oligomer
gugucagggaucacuugggau

SEQ ID NO: 1199 - RNA, 21 nt, artificial
  Oligomer
caacaaggcuuccagcuggau

SEQ ID NO: 1200 - RNA, 21 nt, artificial
  Oligomer
auaagauacucacuguucaug

SEQ ID NO: 1201 - RNA, 21 nt, artificial
  Oligomer
guguguagcauguaccuuauu

SEQ ID NO: 1202 - RNA, 21 nt, artificial
  Oligomer
ccaggaagcucauugaguugu

SEQ ID NO: 1203 - RNA, 21 nt, artificial
  Oligomer
cccugaggaugaacacuugug

SEQ ID NO: 1204 - RNA, 21 nt, artificial
  Oligomer
gcaugaauguaagaguaggaa

SEQ ID NO: 1205 - RNA, 21 nt, artificial
  Oligomer
ccugaggaugaacacuugugu

SEQ ID NO: 1206 - RNA, 21 nt, artificial
  Oligomer
cuagaacuguuuacaugaaga

SEQ ID NO: 1207 - RNA, 21 nt, artificial
  Oligomer
ucuagaacuguuuacaugaag

SEQ ID NO: 1208 - RNA, 21 nt, artificial
  Oligomer
uugggaucuuugacacuugaa

SEQ ID NO: 1209 - RNA, 21 nt, artificial
  Oligomer
uccggcacucugaguucauca

SEQ ID NO: 1210 - RNA, 21 nt, artificial
  Oligomer
aucugggucuuccaucuagaa

SEQ ID NO: 1211 - RNA, 21 nt, artificial
  Oligomer
ucuuguuuuucugaucggagc

SEQ ID NO: 1212 - RNA, 21 nt, artificial
  Oligomer
ccaaguguguuuguuguuugu

SEQ ID NO: 1213 - RNA, 21 nt, artificial
  Oligomer
acaaggcuuccagcuggaugu

SEQ ID NO: 1214 - RNA, 21 nt, artificial
  Oligomer
uguucaugaauacacuugaug

SEQ ID NO: 1215 - RNA, 21 nt, artificial
  Oligomer
uccaucuagaacuguuuacau

SEQ ID NO: 1216 - RNA, 21 nt, artificial
  Oligomer
ucuuccaucuagaacuguuua

SEQ ID NO: 1217 - RNA, 21 nt, artificial
  Oligomer
cuugaaaaauuacaccuggca

SEQ ID NO: 1218 - RNA, 21 nt, artificial
  Oligomer
gaccaaguguguuuguuguuu

SEQ ID NO: 1219 - RNA, 21 nt, artificial
  Oligomer
ggaccaaguguguuuguuguu

SEQ ID NO: 1220 - RNA, 21 nt, artificial
  Oligomer
cguggaggugguuuguguauc

SEQ ID NO: 1221 - RNA, 21 nt, artificial
  Oligomer
acuugugugccaaccugaugc

SEQ ID NO: 1222 - RNA, 21 nt, artificial
  Oligomer
cuaucuuacagacgcaugaau

SEQ ID NO: 1223 - RNA, 21 nt, artificial
  Oligomer
gcaucacuacugaccuguugu

SEQ ID NO: 1224 - RNA, 21 nt, artificial
  Oligomer
gacugauuccugugguuggaa

SEQ ID NO: 1225 - RNA, 21 nt, artificial
  Oligomer
ugcucauugaggaguguugaa

SEQ ID NO: 1226 - RNA, 21 nt, artificial
  Oligomer
ucaugaauacacuugauguuc

SEQ ID NO: 1227 - RNA, 21 nt, artificial
  Oligomer
ugggaucuuugacacuugaaa

SEQ ID NO: 1228 - RNA, 21 nt, artificial
  Oligomer
caaguguguuuguuguuuguu

SEQ ID NO: 1229 - RNA, 21 nt, artificial
  Oligomer
uguguaucuuacuggucugaa

SEQ ID NO: 1230 - RNA, 21 nt, artificial
  Oligomer
uuguguaucuuacuggucuga

SEQ ID NO: 1231 - RNA, 21 nt, artificial
  Oligomer
aggugguuuguguaucuuacu

SEQ ID NO: 1232 - RNA, 21 nt, artificial
  Oligomer
caguuaacaguggugugacau

SEQ ID NO: 1233 - RNA, 21 nt, artificial
  Oligomer
auguguguguagcauguaccu

SEQ ID NO: 1234 - RNA, 21 nt, artificial
  Oligomer
gagggacugauuccugugguu

SEQ ID NO: 1235 - RNA, 21 nt, artificial
  Oligomer
caucaagaagaagcuguacag

SEQ ID NO: 1236 - RNA, 21 nt, artificial
  Oligomer
agauaagauacucacuguuca

SEQ ID NO: 1237 - RNA, 21 nt, artificial
  Oligomer
auuacaccuggcagcugcguu

SEQ ID NO: 1238 - RNA, 21 nt, artificial
  Oligomer
caugaauguaagaguaggaag

SEQ ID NO: 1239 - RNA, 21 nt, artificial
  Oligomer
ucguggaggugguuuguguau

SEQ ID NO: 1240 - RNA, 21 nt, artificial
  Oligomer
gucuuccaucuagaacuguuu

SEQ ID NO: 1241 - RNA, 21 nt, artificial
  Oligomer
aagggaccaaguguguuuguu

SEQ ID NO: 1242 - RNA, 21 nt, artificial
  Oligomer
ucugaagggaccaaguguguu

SEQ ID NO: 1243 - RNA, 21 nt, artificial
  Oligomer
agcugagggacugauuccugu

SEQ ID NO: 1244 - RNA, 21 nt, artificial
  Oligomer
gaagaagcuguacagcucgga

SEQ ID NO: 1245 - RNA, 21 nt, artificial
  Oligomer
cuuccaucuagaacuguuuac

SEQ ID NO: 1246 - RNA, 21 nt, artificial
  Oligomer
caucguguacugcagaguuga

SEQ ID NO: 1247 - RNA, 21 nt, artificial
  Oligomer
guuuguguaucuuacuggucu

SEQ ID NO: 1248 - RNA, 21 nt, artificial
  Oligomer
cugugguuggaaaacugaggc

SEQ ID NO: 1249 - RNA, 21 nt, artificial
  Oligomer
ucggaacagcugcucauugag

SEQ ID NO: 1250 - RNA, 21 nt, artificial
  Oligomer
gaugaacacuugugugccaac

SEQ ID NO: 1251 - RNA, 21 nt, artificial
  Oligomer
cagugacccugaggaugaaca

SEQ ID NO: 1252 - RNA, 21 nt, artificial
  Oligomer
accaaguguguuuguuguuug

SEQ ID NO: 1253 - RNA, 21 nt, artificial
  Oligomer
gaagggaccaaguguguuugu

SEQ ID NO: 1254 - RNA, 21 nt, artificial
  Oligomer
ggaagcucauugaguugugug

SEQ ID NO: 1255 - RNA, 21 nt, artificial
  Oligomer
agagacgacugaacuuuuggg

SEQ ID NO: 1256 - RNA, 21 nt, artificial
  Oligomer
cugaugccuagccaguuggua

SEQ ID NO: 1257 - RNA, 21 nt, artificial
  Oligomer
cccaucguguacugcagaguu

SEQ ID NO: 1258 - RNA, 21 nt, artificial
  Oligomer
uugaaaaauuacaccuggcag

SEQ ID NO: 1259 - RNA, 21 nt, artificial
  Oligomer
cuugggaucuuugacacuuga

SEQ ID NO: 1260 - RNA, 21 nt, artificial
  Oligomer
cuguuguaggcagcuaucuua

SEQ ID NO: 1261 - RNA, 21 nt, artificial
  Oligomer
aucuuguuuuucugaucggag

SEQ ID NO: 1262 - RNA, 21 nt, artificial
  Oligomer
aagacacggcuuaccuggaug

SEQ ID NO: 1263 - RNA, 21 nt, artificial
  Oligomer
ggugguuuguguaucuuacug

SEQ ID NO: 1264 - RNA, 21 nt, artificial
  Oligomer
gcuggauguguguguagcaug

SEQ ID NO: 1265 - RNA, 21 nt, artificial
  Oligomer
cuuccagcuggaugugugugu

SEQ ID NO: 1266 - RNA, 21 nt, artificial
  Oligomer
aacaaggcuuccagcuggaug

SEQ ID NO: 1267 - RNA, 21 nt, artificial
  Oligomer
cucauugaguugugugcgggu

SEQ ID NO: 1268 - RNA, 21 nt, artificial
  Oligomer
caggaagcucauugaguugug

SEQ ID NO: 1269 - RNA, 21 nt, artificial
  Oligomer
ugaugccuagccaguugguaa

SEQ ID NO: 1270 - RNA, 21 nt, artificial
  Oligomer
ucguguacugcagaguugagc

SEQ ID NO: 1271 - RNA, 21 nt, artificial
  Oligomer
acuugaaaaauuacaccuggc

SEQ ID NO: 1272 - RNA, 21 nt, artificial
  Oligomer
cagggaucacuugggaucuuu

SEQ ID NO: 1273 - RNA, 21 nt, artificial
  Oligomer
uacagacgcaugaauguaaga

SEQ ID NO: 1274 - RNA, 21 nt, artificial
  Oligomer
gcagcuaucuuacagacgcau

SEQ ID NO: 1275 - RNA, 21 nt, artificial
  Oligomer
uguuguaggcagcuaucuuac

SEQ ID NO: 1276 - RNA, 21 nt, artificial
  Oligomer
ucacuacugaccuguuguagg

SEQ ID NO: 1277 - RNA, 21 nt, artificial
  Oligomer
cuuguuuuucugaucggagca

SEQ ID NO: 1278 - RNA, 21 nt, artificial
  Oligomer
gaagacacggcuuaccuggau

SEQ ID NO: 1279 - RNA, 21 nt, artificial
  Oligomer
guguaucuuacuggucugaag

SEQ ID NO: 1280 - RNA, 21 nt, artificial
  Oligomer
gucguggaggugguuugugua

SEQ ID NO: 1281 - RNA, 21 nt, artificial
  Oligomer
gacaguuaacaguggugugac

SEQ ID NO: 1282 - RNA, 21 nt, artificial
  Oligomer
uacugacaguuaacaguggug

SEQ ID NO: 1283 - RNA, 21 nt, artificial
  Oligomer
guguagcauguaccuuauuau

SEQ ID NO: 1284 - RNA, 21 nt, artificial
  Oligomer
guguuucccaggaagcucauu

SEQ ID NO: 1285 - RNA, 21 nt, artificial
  Oligomer
ugaggaguguugaacuucaac

SEQ ID NO: 1286 - RNA, 21 nt, artificial
  Oligomer
gcugcucauugaggaguguug

SEQ ID NO: 1287 - RNA, 21 nt, artificial
  Oligomer
uuacaccuggcagcugcguuu

SEQ ID NO: 1288 - RNA, 21 nt, artificial
  Oligomer
ugaagggaccaaguguguuug

SEQ ID NO: 1289 - RNA, 21 nt, artificial
  Oligomer
ggaggugguuuguguaucuua

SEQ ID NO: 1290 - RNA, 21 nt, artificial
  Oligomer
aggaagcucauugaguugugu

SEQ ID NO: 1291 - RNA, 21 nt, artificial
  Oligomer
ucuuagcaguucucgcugacc

SEQ ID NO: 1292 - RNA, 21 nt, artificial
  Oligomer
cugcucauugaggaguguuga

SEQ ID NO: 1293 - RNA, 21 nt, artificial
  Oligomer
gcacuugucuuagcaguucuc

SEQ ID NO: 1294 - RNA, 21 nt, artificial
  Oligomer
acuguucaugaauacacuuga

SEQ ID NO: 1295 - RNA, 21 nt, artificial
  Oligomer
gaagauaagauacucacuguu

SEQ ID NO: 1296 - RNA, 21 nt, artificial
  Oligomer
caucuagaacuguuuacauga

SEQ ID NO: 1297 - RNA, 21 nt, artificial
  Oligomer
uuccaucuagaacuguuuaca

SEQ ID NO: 1298 - RNA, 21 nt, artificial
  Oligomer
aauuacaccuggcagcugcgu

SEQ ID NO: 1299 - RNA, 21 nt, artificial
  Oligomer
accuguuguaggcagcuaucu

SEQ ID NO: 1300 - RNA, 21 nt, artificial
  Oligomer
agggaccaaguguguuuguug

SEQ ID NO: 1301 - RNA, 21 nt, artificial
  Oligomer
gucugaagggaccaagugugu

SEQ ID NO: 1302 - RNA, 21 nt, artificial
  Oligomer
uccucaccaugccuagccuuu

SEQ ID NO: 1303 - RNA, 21 nt, artificial
  Oligomer
uguguagcauguaccuuauua

SEQ ID NO: 1304 - RNA, 21 nt, artificial
  Oligomer
ggauguguguguagcauguac

SEQ ID NO: 1305 - RNA, 21 nt, artificial
  Oligomer
gacagagacgacugaacuuuu

SEQ ID NO: 1306 - RNA, 21 nt, artificial
  Oligomer
ucaucaagaagaagcuguaca

SEQ ID NO: 1307 - RNA, 21 nt, artificial
  Oligomer
ugaaaaauuacaccuggcagc

SEQ ID NO: 1308 - RNA, 21 nt, artificial
  Oligomer
cagcuaucuuacagacgcaug

SEQ ID NO: 1309 - RNA, 21 nt, artificial
  Oligomer
acaguuaacaguggugugaca

SEQ ID NO: 1310 - RNA, 21 nt, artificial
  Oligomer
cacucugaguucaucagcaaa

SEQ ID NO: 1311 - RNA, 21 nt, artificial
  Oligomer
cagagacgacugaacuuuugg

SEQ ID NO: 1312 - RNA, 21 nt, artificial
  Oligomer
uguugaacuucaaccugaggg

SEQ ID NO: 1313 - RNA, 21 nt, artificial
  Oligomer
acuugucuuagcaguucucgc

SEQ ID NO: 1314 - RNA, 21 nt, artificial
  Oligomer
uuccgagucaucaagaagaag

SEQ ID NO: 1315 - RNA, 21 nt, artificial
  Oligomer
guucaugaauacacuugaugu

SEQ ID NO: 1316 - RNA, 21 nt, artificial
  Oligomer
gggaucuuugacacuugaaaa

SEQ ID NO: 1317 - RNA, 21 nt, artificial
  Oligomer
caucacuacugaccuguugua

SEQ ID NO: 1318 - RNA, 21 nt, artificial
  Oligomer
guggaggugguuuguguaucu

SEQ ID NO: 1319 - RNA, 21 nt, artificial
  Oligomer
aguuaacaguggugugacauc

SEQ ID NO: 1320 - RNA, 21 nt, artificial
  Oligomer
cucugaguucaucagcaaacg

SEQ ID NO: 1321 - RNA, 21 nt, artificial
  Oligomer
cucaguacuguagcaugaaac

SEQ ID NO: 1322 - RNA, 21 nt, artificial
  Oligomer
gaauaguguuucccaggaagc

SEQ ID NO: 1323 - RNA, 21 nt, artificial
  Oligomer
cugauuccugugguuggaaaa

SEQ ID NO: 1324 - RNA, 21 nt, artificial
  Oligomer
guguugaacuucaaccugagg

SEQ ID NO: 1325 - RNA, 21 nt, artificial
  Oligomer
guucaaguauuaagaccuaug

SEQ ID NO: 1326 - RNA, 21 nt, artificial
  Oligomer
aucacuugggaucuuugacac

SEQ ID NO: 1327 - RNA, 21 nt, artificial
  Oligomer
ggaucacuugggaucuuugac

SEQ ID NO: 1328 - RNA, 21 nt, artificial
  Oligomer
agggaucacuugggaucuuug

SEQ ID NO: 1329 - RNA, 21 nt, artificial
  Oligomer
cgcaugaauguaagaguagga

SEQ ID NO: 1330 - RNA, 21 nt, artificial
  Oligomer
cugaagggaccaaguguguuu

SEQ ID NO: 1331 - RNA, 21 nt, artificial
  Oligomer
guaucuuacuggucugaaggg

SEQ ID NO: 1332 - RNA, 21 nt, artificial
  Oligomer
uuuguguaucuuacuggucug

SEQ ID NO: 1333 - RNA, 21 nt, artificial
  Oligomer
gguuuguguaucuuacugguc

SEQ ID NO: 1334 - RNA, 21 nt, artificial
  Oligomer
acaguggugugacauccagag

SEQ ID NO: 1335 - RNA, 21 nt, artificial
  Oligomer
guguguguagcauguaccuua

SEQ ID NO: 1336 - RNA, 21 nt, artificial
  Oligomer
gauguguguguagcauguacc

SEQ ID NO: 1337 - RNA, 21 nt, artificial
  Oligomer
uccagcuggauguguguguag

SEQ ID NO: 1338 - RNA, 21 nt, artificial
  Oligomer
caagacagagacgacugaacu

SEQ ID NO: 1339 - RNA, 21 nt, artificial
  Oligomer
agcugcucauugaggaguguu

SEQ ID NO: 1340 - RNA, 21 nt, artificial
  Oligomer
uucaaguauuaagaccuaugc

SEQ ID NO: 1341 - RNA, 21 nt, artificial
  Oligomer
ggaugaacacuugugugccaa

SEQ ID NO: 1342 - RNA, 21 nt, artificial
  Oligomer
gauaagauacucacuguucau

SEQ ID NO: 1343 - RNA, 21 nt, artificial
  Oligomer
ugacacuugaaaaauuacacc

SEQ ID NO: 1344 - RNA, 21 nt, artificial
  Oligomer
ugaccuguuguaggcagcuau

SEQ ID NO: 1345 - RNA, 21 nt, artificial
  Oligomer
gggaccaaguguguuuguugu

SEQ ID NO: 1346 - RNA, 21 nt, artificial
  Oligomer
guagcaugaaacaaaggcuua

SEQ ID NO: 1347 - RNA, 21 nt, artificial
  Oligomer
aauaguguuucccaggaagcu

SEQ ID NO: 1348 - RNA, 21 nt, artificial
  Oligomer
uugaggaguguugaacuucaa

SEQ ID NO: 1349 - RNA, 21 nt, artificial
  Oligomer
cauugaggaguguugaacuuc

SEQ ID NO: 1350 - RNA, 21 nt, artificial
  Oligomer
aagccaggugggcaaagaacu

SEQ ID NO: 1351 - RNA, 21 nt, artificial
  Oligomer
caugaauacacuugauguuca

SEQ ID NO: 1352 - RNA, 21 nt, artificial
  Oligomer
gacgcaugaauguaagaguag

SEQ ID NO: 1353 - RNA, 21 nt, artificial
  Oligomer
cuuacagacgcaugaauguaa

SEQ ID NO: 1354 - RNA, 21 nt, artificial
  Oligomer
uguaggcagcuaucuuacaga

SEQ ID NO: 1355 - RNA, 21 nt, artificial
  Oligomer
guuguaggcagcuaucuuaca

SEQ ID NO: 1356 - RNA, 21 nt, artificial
  Oligomer
uuuucugaucggagcaucacu

SEQ ID NO: 1357 - RNA, 21 nt, artificial
  Oligomer
uuguuuuucugaucggagcau

SEQ ID NO: 1358 - RNA, 21 nt, artificial
  Oligomer
uguaucuuguuuuucugaucg

SEQ ID NO: 1359 - RNA, 21 nt, artificial
  Oligomer
aguggugugacauccagagag

SEQ ID NO: 1360 - RNA, 21 nt, artificial
  Oligomer
uaguguuucccaggaagcuca

SEQ ID NO: 1361 - RNA, 21 nt, artificial
  Oligomer
agaagcuguacagcucggaac

SEQ ID NO: 1362 - RNA, 21 nt, artificial
  Oligomer
ucugggucuuccaucuagaac

SEQ ID NO: 1363 - RNA, 21 nt, artificial
  Oligomer
uacugcagaguugagcuggca

SEQ ID NO: 1364 - RNA, 21 nt, artificial
  Oligomer
acaccuggcagcugcguuuaa

SEQ ID NO: 1365 - RNA, 21 nt, artificial
  Oligomer
ugugacauccagagagcagcu

SEQ ID NO: 1366 - RNA, 21 nt, artificial
  Oligomer
cugacaguuaacaguggugug

SEQ ID NO: 1367 - RNA, 21 nt, artificial
  Oligomer
ucauugaguugugugcgggug

SEQ ID NO: 1368 - RNA, 21 nt, artificial
  Oligomer
ggaauaguguuucccaggaag

SEQ ID NO: 1369 - RNA, 21 nt, artificial
  Oligomer
acugauuccugugguuggaaa

SEQ ID NO: 1370 - RNA, 21 nt, artificial
  Oligomer
gaauacacuugauguucaagu

SEQ ID NO: 1371 - RNA, 21 nt, artificial
  Oligomer
ucacuugggaucuuugacacu

SEQ ID NO: 1372 - RNA, 21 nt, artificial
  Oligomer
gaucacuugggaucuuugaca

SEQ ID NO: 1373 - RNA, 21 nt, artificial
  Oligomer
acgcaugaauguaagaguagg

SEQ ID NO: 1374 - RNA, 21 nt, artificial
  Oligomer
acugaccuguuguaggcagcu

SEQ ID NO: 1375 - RNA, 21 nt, artificial
  Oligomer
gacgcacuugucuuagcaguu

SEQ ID NO: 1376 - RNA, 21 nt, artificial
  Oligomer
uucugaucggagcaucacuac

SEQ ID NO: 1377 - RNA, 21 nt, artificial
  Oligomer
uuucugaucggagcaucacua

SEQ ID NO: 1378 - RNA, 21 nt, artificial
  Oligomer
uguaucuuacuggucugaagg

SEQ ID NO: 1379 - RNA, 21 nt, artificial
  Oligomer
gugguuuguguaucuuacugg

SEQ ID NO: 1380 - RNA, 21 nt, artificial
  Oligomer
acugacaguuaacaguggugu

SEQ ID NO: 1381 - RNA, 21 nt, artificial
  Oligomer
uacuguagcaugaaacaaagg

SEQ ID NO: 1382 - RNA, 21 nt, artificial
  Oligomer
ccugugguuggaaaacugagg

SEQ ID NO: 1383 - RNA, 21 nt, artificial
  Oligomer
caggugggcaaagaacuacug

SEQ ID NO: 1384 - RNA, 21 nt, artificial
  Oligomer
uugguaagccaggugggcaaa

SEQ ID NO: 1385 - RNA, 21 nt, artificial
  Oligomer
ugaauacacuugauguucaag

SEQ ID NO: 1386 - RNA, 21 nt, artificial
  Oligomer
acaugaagauaagauacucac

SEQ ID NO: 1387 - RNA, 21 nt, artificial
  Oligomer
gggucuuccaucuagaacugu

SEQ ID NO: 1388 - RNA, 21 nt, artificial
  Oligomer
cugggucuuccaucuagaacu

SEQ ID NO: 1389 - RNA, 21 nt, artificial
  Oligomer
cugaggaugaacacuugugug

SEQ ID NO: 1390 - RNA, 21 nt, artificial
  Oligomer
acuugggaucuuugacacuug

SEQ ID NO: 1391 - RNA, 21 nt, artificial
  Oligomer
agacgcaugaauguaagagua

SEQ ID NO: 1392 - RNA, 21 nt, artificial
  Oligomer
acagacgcaugaauguaagag

SEQ ID NO: 1393 - RNA, 21 nt, artificial
  Oligomer
uaucuuacagacgcaugaaug

SEQ ID NO: 1394 - RNA, 21 nt, artificial
  Oligomer
uaucuuguuuuucugaucgga

SEQ ID NO: 1395 - RNA, 21 nt, artificial
  Oligomer
aucuuacuggucugaagggac

SEQ ID NO: 1396 - RNA, 21 nt, artificial
  Oligomer
uggugugacauccagagagca

SEQ ID NO: 1397 - RNA, 21 nt, artificial
  Oligomer
aacaguggugugacauccaga

SEQ ID NO: 1398 - RNA, 21 nt, artificial
  Oligomer
ugacaguuaacagugguguga

SEQ ID NO: 1399 - RNA, 21 nt, artificial
  Oligomer
aaggcuuccagcuggaugugu

SEQ ID NO: 1400 - RNA, 21 nt, artificial
  Oligomer
cccucaguacuguagcaugaa

SEQ ID NO: 1401 - RNA, 21 nt, artificial
  Oligomer
aguguuucccaggaagcucau

SEQ ID NO: 1402 - RNA, 21 nt, artificial
  Oligomer
ugagggacugauuccuguggu

SEQ ID NO: 1403 - RNA, 21 nt, artificial
  Oligomer
caggacgcacuugucuuagca

SEQ ID NO: 1404 - RNA, 21 nt, artificial
  Oligomer
ggaacagcugcucauugagga

SEQ ID NO: 1405 - RNA, 21 nt, artificial
  Oligomer
cucggaacagcugcucauuga

SEQ ID NO: 1406 - RNA, 21 nt, artificial
  Oligomer
aagaagcuguacagcucggaa

SEQ ID NO: 1407 - RNA, 21 nt, artificial
  Oligomer
cacuugucuuagcaguucucg

SEQ ID NO: 1408 - RNA, 21 nt, artificial
  Oligomer
uguuuagcuccgccaacucuc

SEQ ID NO: 1409 - RNA, 21 nt, artificial
  Oligomer
cacuugugugccaaccugaug

SEQ ID NO: 1410 - RNA, 21 nt, artificial
  Oligomer
ugccaucugggucuuccaucu

SEQ ID NO: 1411 - RNA, 21 nt, artificial
  Oligomer
gggaucacuugggaucuuuga

SEQ ID NO: 1412 - RNA, 21 nt, artificial
  Oligomer
guaucuuguuuuucugaucgg

SEQ ID NO: 1413 - RNA, 21 nt, artificial
  Oligomer
uucccaggaagcucauugagu

SEQ ID NO: 1414 - RNA, 21 nt, artificial
  Oligomer
guuucccaggaagcucauuga

SEQ ID NO: 1415 - RNA, 21 nt, artificial
  Oligomer
uccugugguuggaaaacugag

SEQ ID NO: 1416 - RNA, 21 nt, artificial
  Oligomer
agggacugauuccugugguug

SEQ ID NO: 1417 - RNA, 21 nt, artificial
  Oligomer
cucauugaggaguguugaacu

SEQ ID NO: 1418 - RNA, 21 nt, artificial
  Oligomer
ccgagucaucaagaagaagcu

SEQ ID NO: 1419 - RNA, 21 nt, artificial
  Oligomer
guaagccaggugggcaaagaa

SEQ ID NO: 1420 - RNA, 21 nt, artificial
  Oligomer
acacuugugugccaaccugau

SEQ ID NO: 1421 - RNA, 21 nt, artificial
  Oligomer
aagauaagauacucacuguuc

SEQ ID NO: 1422 - RNA, 21 nt, artificial
  Oligomer
caucugggucuuccaucuaga

SEQ ID NO: 1423 - RNA, 21 nt, artificial
  Oligomer
aucuuacagacgcaugaaugu

SEQ ID NO: 1424 - RNA, 21 nt, artificial
  Oligomer
acucugaguucaucagcaaac

SEQ ID NO: 1425 - RNA, 21 nt, artificial
  Oligomer
ucccaggaagcucauugaguu

SEQ ID NO: 1426 - RNA, 21 nt, artificial
  Oligomer
gcucauugaggaguguugaac

SEQ ID NO: 1427 - RNA, 21 nt, artificial
  Oligomer
gucaucaagaagaagcuguac

SEQ ID NO: 1428 - RNA, 21 nt, artificial
  Oligomer
cuggcuuccgagucaucaaga

SEQ ID NO: 1429 - RNA, 21 nt, artificial
  Oligomer
uagccaguugguaagccaggu

SEQ ID NO: 1430 - RNA, 21 nt, artificial
  Oligomer
ugaacacuugugugccaaccu

SEQ ID NO: 1431 - RNA, 21 nt, artificial
  Oligomer
gauguucaaguauuaagaccu

SEQ ID NO: 1432 - RNA, 21 nt, artificial
  Oligomer
uaagauacucacuguucauga

SEQ ID NO: 1433 - RNA, 21 nt, artificial
  Oligomer
acgcacuugucuuagcaguuc

SEQ ID NO: 1434 - RNA, 21 nt, artificial
  Oligomer
ucagggaucacuugggaucuu

SEQ ID NO: 1435 - RNA, 21 nt, artificial
  Oligomer
uacugaccuguuguaggcagc

SEQ ID NO: 1436 - RNA, 21 nt, artificial
  Oligomer
ucggagcaucacuacugaccu

SEQ ID NO: 1437 - RNA, 21 nt, artificial
  Oligomer
acuggucugaagggaccaagu

SEQ ID NO: 1438 - RNA, 21 nt, artificial
  Oligomer
ugguuuguguaucuuacuggu

SEQ ID NO: 1439 - RNA, 21 nt, artificial
  Oligomer
ccucaguacuguagcaugaaa

SEQ ID NO: 1440 - RNA, 21 nt, artificial
  Oligomer
agcucauugaguugugugcgg

SEQ ID NO: 1441 - RNA, 21 nt, artificial
  Oligomer
cagcugcucauugaggagugu

SEQ ID NO: 1442 - RNA, 21 nt, artificial
  Oligomer
agaagaagcuguacagcucgg

SEQ ID NO: 1443 - RNA, 21 nt, artificial
  Oligomer
ucaagaagaagcuguacagcu

SEQ ID NO: 1444 - RNA, 21 nt, artificial
  Oligomer
gagucaucaagaagaagcugu

SEQ ID NO: 1445 - RNA, 21 nt, artificial
  Oligomer
ccaggugggcaaagaacuacu

SEQ ID NO: 1446 - RNA, 21 nt, artificial
  Oligomer
gaugccuagccaguugguaag

SEQ ID NO: 1447 - RNA, 21 nt, artificial
  Oligomer
ugaggaugaacacuugugugc

SEQ ID NO: 1448 - RNA, 21 nt, artificial
  Oligomer
aaauuacaccuggcagcugcg

SEQ ID NO: 1449 - RNA, 21 nt, artificial
  Oligomer
cagacgcaugaauguaagagu

SEQ ID NO: 1450 - RNA, 21 nt, artificial
  Oligomer
agcuaucuuacagacgcauga

SEQ ID NO: 1451 - RNA, 21 nt, artificial
  Oligomer
cuuacuggucugaagggacca

SEQ ID NO: 1452 - RNA, 21 nt, artificial
  Oligomer
uggaggugguuuguguaucuu

SEQ ID NO: 1453 - RNA, 21 nt, artificial
  Oligomer
uguguguagcauguaccuuau

SEQ ID NO: 1454 - RNA, 21 nt, artificial
  Oligomer
cuguagcaugaaacaaaggcu

SEQ ID NO: 1455 - RNA, 21 nt, artificial
  Oligomer
ggcacucugaguucaucagca

SEQ ID NO: 1456 - RNA, 21 nt, artificial
  Oligomer
ucauugaggaguguugaacuu

SEQ ID NO: 1457 - RNA, 21 nt, artificial
  Oligomer
uugugugccaaccugaugcag

SEQ ID NO: 1458 - RNA, 21 nt, artificial
  Oligomer
caaguauuaagaccuaugcaa

SEQ ID NO: 1459 - RNA, 21 nt, artificial
  Oligomer
ugaagauaagauacucacugu

SEQ ID NO: 1460 - RNA, 21 nt, artificial
  Oligomer
ccaucugggucuuccaucuag

SEQ ID NO: 1461 - RNA, 21 nt, artificial
  Oligomer
guguacugcagaguugagcug

SEQ ID NO: 1462 - RNA, 21 nt, artificial
  Oligomer
ggaucuuugacacuugaaaaa

SEQ ID NO: 1463 - RNA, 21 nt, artificial
  Oligomer
augaauguaagaguaggaagg

SEQ ID NO: 1464 - RNA, 21 nt, artificial
  Oligomer
aucacuacugaccuguuguag

SEQ ID NO: 1465 - RNA, 21 nt, artificial
  Oligomer
gaucggagcaucacuacugac

SEQ ID NO: 1466 - RNA, 21 nt, artificial
  Oligomer
guuuuucugaucggagcauca

SEQ ID NO: 1467 - RNA, 21 nt, artificial
  Oligomer
gaggugguuuguguaucuuac

SEQ ID NO: 1468 - RNA, 21 nt, artificial
  Oligomer
uuacugacaguuaacaguggu

SEQ ID NO: 1469 - RNA, 21 nt, artificial
  Oligomer
guacuguagcaugaaacaaag

SEQ ID NO: 1470 - RNA, 21 nt, artificial
  Oligomer
gaagcucauugaguugugugc

SEQ ID NO: 1471 - RNA, 21 nt, artificial
  Oligomer
aaaacugaggcagccaccuaa

SEQ ID NO: 1472 - RNA, 21 nt, artificial
  Oligomer
ugucuuagcaguucucgcuga

SEQ ID NO: 1473 - RNA, 21 nt, artificial
  Oligomer
agucaucaagaagaagcugua

SEQ ID NO: 1474 - RNA, 21 nt, artificial
  Oligomer
caugaagauaagauacucacu

SEQ ID NO: 1475 - RNA, 21 nt, artificial
  Oligomer
gacacuugaaaaauuacaccu

SEQ ID NO: 1476 - RNA, 21 nt, artificial
  Oligomer
ugacccugaggaugaacacuu

SEQ ID NO: 1477 - RNA, 21 nt, artificial
  Oligomer
gagcaucacuacugaccuguu

SEQ ID NO: 1478 - RNA, 21 nt, artificial
  Oligomer
ucagugacccugaggaugaac

SEQ ID NO: 1479 - RNA, 21 nt, artificial
  Oligomer
ucuuacuggucugaagggacc

SEQ ID NO: 1480 - RNA, 21 nt, artificial
  Oligomer
aguucaucagcaaacgcccug

SEQ ID NO: 1481 - RNA, 21 nt, artificial
  Oligomer
caguggugugacauccagaga

SEQ ID NO: 1482 - RNA, 21 nt, artificial
  Oligomer
uguguguguagcauguaccuu

SEQ ID NO: 1483 - RNA, 21 nt, artificial
  Oligomer
uggauguguguguagcaugua

SEQ ID NO: 1484 - RNA, 21 nt, artificial
  Oligomer
cuggauguguguguagcaugu

SEQ ID NO: 1485 - RNA, 21 nt, artificial
  Oligomer
ucaguacuguagcaugaaaca

SEQ ID NO: 1486 - RNA, 21 nt, artificial
  Oligomer
uuggaaaacugaggcagccac

SEQ ID NO: 1487 - RNA, 21 nt, artificial
  Oligomer
auugaggaguguugaacuuca

SEQ ID NO: 1488 - RNA, 21 nt, artificial
  Oligomer
uugucuuagcaguucucgcug

SEQ ID NO: 1489 - RNA, 21 nt, artificial
  Oligomer
gauacucacuguucaugaaua

SEQ ID NO: 1490 - RNA, 21 nt, artificial
  Oligomer
aaaaauuacaccuggcagcug

SEQ ID NO: 1491 - RNA, 21 nt, artificial
  Oligomer
cacuugaaaaauuacaccugg

SEQ ID NO: 1492 - RNA, 21 nt, artificial
  Oligomer
cacuugggaucuuugacacuu

SEQ ID NO: 1493 - RNA, 21 nt, artificial
  Oligomer
uuacagacgcaugaauguaag

SEQ ID NO: 1494 - RNA, 21 nt, artificial
  Oligomer
agcaugaaacaaaggcuuagg

SEQ ID NO: 1495 - RNA, 21 nt, artificial
  Oligomer
cccaggaagcucauugaguug

SEQ ID NO: 1496 - RNA, 21 nt, artificial
  Oligomer
uguuucccaggaagcucauug

SEQ ID NO: 1497 - RNA, 21 nt, artificial
  Oligomer
acagagacgacugaacuuuug

SEQ ID NO: 1498 - RNA, 21 nt, artificial
  Oligomer
cuguuuagcuccgccaacucu

SEQ ID NO: 1499 - RNA, 21 nt, artificial
  Oligomer
cuguucaugaauacacuugau

SEQ ID NO: 1500 - RNA, 21 nt, artificial
  Oligomer
agugccaucugggucuuccau

SEQ ID NO: 1501 - RNA, 21 nt, artificial
  Oligomer
acccugaggaugaacacuugu

SEQ ID NO: 1502 - RNA, 21 nt, artificial
  Oligomer
aucggagcaucacuacugacc

SEQ ID NO: 1503 - RNA, 21 nt, artificial
  Oligomer
cucagugacccugaggaugaa

SEQ ID NO: 1504 - RNA, 21 nt, artificial
  Oligomer
uacuggucugaagggaccaag

SEQ ID NO: 1505 - RNA, 21 nt, artificial
  Oligomer
uuccagcuggaugugugugua

SEQ ID NO: 1506 - RNA, 21 nt, artificial
  Oligomer
ugauuccugugguuggaaaac

SEQ ID NO: 1507 - RNA, 21 nt, artificial
  Oligomer
aguguugaacuucaaccugag

SEQ ID NO: 1508 - RNA, 21 nt, artificial
  Oligomer
aacagcugcucauugaggagu

SEQ ID NO: 1509 - RNA, 21 nt, artificial
  Oligomer
cuugucuuagcaguucucgcu

SEQ ID NO: 1510 - RNA, 21 nt, artificial
  Oligomer
uccgagucaucaagaagaagc

SEQ ID NO: 1511 - RNA, 21 nt, artificial
  Oligomer
ugaucggagcaucacuacuga

SEQ ID NO: 1512 - RNA, 21 nt, artificial
  Oligomer
ucugaucggagcaucacuacu

SEQ ID NO: 1513 - RNA, 21 nt, artificial
  Oligomer
uagcaugaaacaaaggcuuag

SEQ ID NO: 1514 - RNA, 21 nt, artificial
  Oligomer
gcacucugaguucaucagcaa

SEQ ID NO: 1515 - RNA, 21 nt, artificial
  Oligomer
auaguguuucccaggaagcuc

SEQ ID NO: 1516 - RNA, 21 nt, artificial
  Oligomer
gauuccugugguuggaaaacu

SEQ ID NO: 1517 - RNA, 21 nt, artificial
  Oligomer
aggacgcacuugucuuagcag

SEQ ID NO: 1518 - RNA, 21 nt, artificial
  Oligomer
augccuagccaguugguaagc

SEQ ID NO: 1519 - RNA, 21 nt, artificial
  Oligomer
cgcacuugucuuagcaguucu

SEQ ID NO: 1520 - RNA, 21 nt, artificial
  Oligomer
ugauguucaaguauuaagacc

SEQ ID NO: 1521 - RNA, 21 nt, artificial
  Oligomer
ggucuuccaucuagaacuguu

SEQ ID NO: 1522 - RNA, 21 nt, artificial
  Oligomer
uacaccuggcagcugcguuua

SEQ ID NO: 1523 - RNA, 21 nt, artificial
  Oligomer
gucagggaucacuugggaucu

SEQ ID NO: 1524 - RNA, 21 nt, artificial
  Oligomer
ccuguuguaggcagcuaucuu

SEQ ID NO: 1525 - RNA, 21 nt, artificial
  Oligomer
cacuacugaccuguuguaggc

SEQ ID NO: 1526 - RNA, 21 nt, artificial
  Oligomer
ggagcaucacuacugaccugu

SEQ ID NO: 1527 - RNA, 21 nt, artificial
  Oligomer
guuacugacaguuaacagugg

SEQ ID NO: 1528 - RNA, 21 nt, artificial
  Oligomer
uguagcaugaaacaaaggcuu

SEQ ID NO: 1529 - RNA, 21 nt, artificial
  Oligomer
uuucccaggaagcucauugag

SEQ ID NO: 1530 - RNA, 21 nt, artificial
  Oligomer
ugugguuggaaaacugaggca

SEQ ID NO: 1531 - RNA, 21 nt, artificial
  Oligomer
uccaagacagagacgacugaa

SEQ ID NO: 1532 - RNA, 21 nt, artificial
  Oligomer
gucuuagcaguucucgcugac

SEQ ID NO: 1533 - RNA, 21 nt, artificial
  Oligomer
gaggaguguugaacuucaacc

SEQ ID NO: 1534 - RNA, 21 nt, artificial
  Oligomer
acagcugcucauugaggagug

SEQ ID NO: 1535 - RNA, 21 nt, artificial
  Oligomer
ucacuguucaugaauacacuu

SEQ ID NO: 1536 - RNA, 21 nt, artificial
  Oligomer
agauacucacuguucaugaau

SEQ ID NO: 1537 - RNA, 21 nt, artificial
  Oligomer
gaaaaauuacaccuggcagcu

SEQ ID NO: 1538 - RNA, 21 nt, artificial
  Oligomer
cuacugaccuguuguaggcag

SEQ ID NO: 1539 - RNA, 21 nt, artificial
  Oligomer
gaguucaucagcaaacgcccu

SEQ ID NO: 1540 - RNA, 21 nt, artificial
  Oligomer
acuggcuuccgagucaucaag

SEQ ID NO: 1541 - RNA, 21 nt, artificial
  Oligomer
augaacacuugugugccaacc

SEQ ID NO: 1542 - RNA, 21 nt, artificial
  Oligomer
ucaaguauuaagaccuaugca

SEQ ID NO: 1543 - RNA, 21 nt, artificial
  Oligomer
guaggcagcuaucuuacagac

SEQ ID NO: 1544 - RNA, 21 nt, artificial
  Oligomer
acuacugaccuguuguaggca

SEQ ID NO: 1545 - RNA, 21 nt, artificial
  Oligomer
uaucuuacuggucugaaggga

SEQ ID NO: 1546 - RNA, 21 nt, artificial
  Oligomer
uuguuacugacaguuaacagu

SEQ ID NO: 1547 - RNA, 21 nt, artificial
  Oligomer
uuuguuacugacaguuaacag

SEQ ID NO: 1548 - RNA, 21 nt, artificial
  Oligomer
gaguguugaacuucaaccuga

SEQ ID NO: 1549 - RNA, 21 nt, artificial
  Oligomer
uaacaguggugugacauccag

SEQ ID NO: 1550 - RNA, 21 nt, artificial
  Oligomer
aagacagagacgacugaacuu

SEQ ID NO: 1551 - RNA, 21 nt, artificial
  Oligomer
aggaguguugaacuucaaccu

SEQ ID NO: 1552 - RNA, 21 nt, artificial
  Oligomer
gaacagcugcucauugaggag

SEQ ID NO: 1553 - RNA, 21 nt, artificial
  Oligomer
uaagccaggugggcaaagaac

SEQ ID NO: 1554 - RNA, 21 nt, artificial
  Oligomer
cacuguucaugaauacacuug

SEQ ID NO: 1555 - RNA, 21 nt, artificial
  Oligomer
augaagauaagauacucacug

SEQ ID NO: 1556 - RNA, 21 nt, artificial
  Oligomer
ccaucuagaacuguuuacaug

SEQ ID NO: 1557 - RNA, 21 nt, artificial
  Oligomer
gaggaugaacacuugugugcc

SEQ ID NO: 1558 - RNA, 21 nt, artificial
  Oligomer
acacuugaaaaauuacaccug

SEQ ID NO: 1559 - RNA, 21 nt, artificial
  Oligomer
ugaauguaagaguaggaaggg

SEQ ID NO: 1560 - RNA, 21 nt, artificial
  Oligomer
agcaucacuacugaccuguug

SEQ ID NO: 1561 - RNA, 21 nt, artificial
  Oligomer
uguuuuucugaucggagcauc

SEQ ID NO: 1562 - RNA, 21 nt, artificial
  Oligomer
ucugaguucaucagcaaacgc

SEQ ID NO: 1563 - RNA, 21 nt, artificial
  Oligomer
ggacgcacuugucuuagcagu

SEQ ID NO: 1564 - RNA, 21 nt, artificial
  Oligomer
acuguagcaugaaacaaaggc

SEQ ID NO: 1565 - RNA, 21 nt, artificial
  Oligomer
aagcucauugaguugugugcg

SEQ ID NO: 1566 - RNA, 21 nt, artificial
  Oligomer
cgagucaucaagaagaagcug

SEQ ID NO: 1567 - RNA, 21 nt, artificial
  Oligomer
uuguaggcagcuaucuuacag

SEQ ID NO: 1568 - RNA, 21 nt, artificial
  Oligomer
gaccuguuguaggcagcuauc

SEQ ID NO: 1569 - RNA, 21 nt, artificial
  Oligomer
uuaacaguggugugacaucca

SEQ ID NO: 1570 - RNA, 21 nt, artificial
  Oligomer
guuggaaaacugaggcagcca

SEQ ID NO: 1571 - RNA, 21 nt, artificial
  Oligomer
gcuuccgagucaucaagaaga

SEQ ID NO: 1572 - RNA, 21 nt, artificial
  Oligomer
cuugugugccaaccugaugca

SEQ ID NO: 1573 - RNA, 21 nt, artificial
  Oligomer
acucacuguucaugaauacac

SEQ ID NO: 1574 - RNA, 21 nt, artificial
  Oligomer
uguacugcagaguugagcugg

SEQ ID NO: 1575 - RNA, 21 nt, artificial
  Oligomer
agugacccugaggaugaacac

SEQ ID NO: 1576 - RNA, 21 nt, artificial
  Oligomer
cagcuggauguguguguagca

SEQ ID NO: 1577 - RNA, 21 nt, artificial
  Oligomer
agcucggaacagcugcucauu

SEQ ID NO: 1578 - RNA, 21 nt, artificial
  Oligomer
gccaucugggucuuccaucua

SEQ ID NO: 1579 - RNA, 21 nt, artificial
  Oligomer
ugucagggaucacuugggauc

SEQ ID NO: 1580 - RNA, 21 nt, artificial
  Oligomer
uaggcagcuaucuuacagacg

SEQ ID NO: 1581 - RNA, 21 nt, artificial
  Oligomer
cugaucggagcaucacuacug

SEQ ID NO: 1582 - RNA, 21 nt, artificial
  Oligomer
caguacuguagcaugaaacaa

SEQ ID NO: 1583 - RNA, 21 nt, artificial
  Oligomer
aagaagaagcuguacagcucg

SEQ ID NO: 1584 - RNA, 21 nt, artificial
  Oligomer
aacacuugugugccaaccuga

SEQ ID NO: 1585 - RNA, 21 nt, artificial
  Oligomer
ggacugauuccugugguugga

SEQ ID NO: 1586 - RNA, 21 nt, artificial
  Oligomer
gaagcuguacagcucggaaca

SEQ ID NO: 1587 - RNA, 21 nt, artificial
  Oligomer
cacuggcuuccgagucaucaa

SEQ ID NO: 1588 - RNA, 21 nt, artificial
  Oligomer
uacucacuguucaugaauaca

SEQ ID NO: 1589 - RNA, 21 nt, artificial
  Oligomer
aagauacucacuguucaugaa

SEQ ID NO: 1590 - RNA, 21 nt, artificial
  Oligomer
ucuuacagacgcaugaaugua

SEQ ID NO: 1591 - RNA, 21 nt, artificial
  Oligomer
uuuuucugaucggagcaucac

SEQ ID NO: 1592 - RNA, 21 nt, artificial
  Oligomer
gugguuggaaaacugaggcag

SEQ ID NO: 1593 - RNA, 21 nt, artificial
  Oligomer
agccaggugggcaaagaacua

SEQ ID NO: 1594 - RNA, 21 nt, artificial
  Oligomer
gacccugaggaugaacacuug

SEQ ID NO: 1595 - RNA, 21 nt, artificial
  Oligomer
uuacuggucugaagggaccaa

SEQ ID NO: 1596 - RNA, 21 nt, artificial
  Oligomer
ugaguucaucagcaaacgccc

SEQ ID NO: 1597 - RNA, 21 nt, artificial
  Oligomer
uguuacugacaguuaacagug

SEQ ID NO: 1598 - RNA, 21 nt, artificial
  Oligomer
aaacugaggcagccaccuaag

SEQ ID NO: 1599 - RNA, 21 nt, artificial
  Oligomer
auuccugugguuggaaaacug

SEQ ID NO: 1600 - RNA, 21 nt, artificial
  Oligomer
aagcuguacagcucggaacag

SEQ ID NO: 1601 - RNA, 21 nt, artificial
  Oligomer
cugaccuguuguaggcagcua

SEQ ID NO: 1602 - RNA, 21 nt, artificial
  Oligomer
uuccugugguuggaaaacuga

SEQ ID NO: 1603 - RNA, 21 nt, artificial
  Oligomer
agacagagacgacugaacuuu

SEQ ID NO: 1604 - RNA, 21 nt, artificial
  Oligomer
aggugggcaaagaacuacugc

SEQ ID NO: 1605 - RNA, 21 nt, artificial
  Oligomer
guuaacaguggugugacaucc

SEQ ID NO: 1606 - RNA, 21 nt, artificial
  Oligomer
ggaguguugaacuucaaccug

SEQ ID NO: 1607 - RNA, 21 nt, artificial
  Oligomer
caagaagaagcuguacagcuc

SEQ ID NO: 1608 - RNA, 21 nt, artificial
  Oligomer
auacucacuguucaugaauac

SEQ ID NO: 1609 - RNA, 21 nt, artificial
  Oligomer
aggaugaacacuugugugcca

SEQ ID NO: 1610 - RNA, 21 nt, artificial
  Oligomer
uggcagcugcguuuaagccuu

SEQ ID NO: 1611 - RNA, 21 nt, artificial
  Oligomer
gcuaucuuacagacgcaugaa

SEQ ID NO: 1612 - RNA, 21 nt, artificial
  Oligomer
cugaguucaucagcaaacgcc

SEQ ID NO: 1613 - RNA, 21 nt, artificial
  Oligomer
aucaagaagaagcuguacagc

SEQ ID NO: 1614 - RNA, 21 nt, artificial
  Oligomer
ggcagcuaucuuacagacgca

SEQ ID NO: 1615 - RNA, 21 nt, artificial
  Oligomer
aggcagcuaucuuacagacgc

SEQ ID NO: 1616 - RNA, 21 nt, artificial
  Oligomer
uggcuuccgagucaucaagaa

SEQ ID NO: 1617 - RNA, 21 nt, artificial
  Oligomer
gaacacuugugugccaaccug

SEQ ID NO: 1618 - RNA, 21 nt, artificial
  Oligomer
cucacuguucaugaauacacu

SEQ ID NO: 1619 - RNA, 21 nt, artificial
  Oligomer
uggucugaagggaccaagugu

SEQ ID NO: 1620 - RNA, 21 nt, artificial
  Oligomer
cuuccgagucaucaagaagaa

SEQ ID NO: 1621 - RNA, 21 nt, artificial
  Oligomer
gugacccugaggaugaacacu

SEQ ID NO: 1622 - RNA, 21 nt, artificial
  Oligomer
agcuggauguguguguagcau

SEQ ID NO: 1623 - RNA, 21 nt, artificial
  Oligomer
aaaauuacaccuggcagcugc

SEQ ID NO: 1624 - RNA, 21 nt, artificial
  Oligomer
gggaauaguguuucccaggaa

SEQ ID NO: 1625 - RNA, 21 nt, artificial
  Oligomer
gaaaacugaggcagccaccua

SEQ ID NO: 1626 - RNA, 21 nt, artificial
  Oligomer
ugggucuuccaucuagaacug

SEQ ID NO: 1627 - RNA, 21 nt, artificial
  Oligomer
aguacuguagcaugaaacaaa

SEQ ID NO: 1628 - RNA, 21 nt, artificial
  Oligomer
ugguuggaaaacugaggcagc

SEQ ID NO: 1629 - RNA, 21 nt, artificial
  Oligomer
ggcuuccgagucaucaagaag

SEQ ID NO: 1630 - RNA, 21 nt, artificial
  Oligomer
cccuaagccuuuguuucaugc

SEQ ID NO: 1631 - RNA, 21 nt, artificial
  Oligomer
aucccaagugaucccugacac

SEQ ID NO: 1632 - RNA, 21 nt, artificial
  Oligomer
auccagcuggaagccuuguug

SEQ ID NO: 1633 - RNA, 21 nt, artificial
  Oligomer
caugaacagugaguaucuuau

SEQ ID NO: 1634 - RNA, 21 nt, artificial
  Oligomer
aauaagguacaugcuacacac

SEQ ID NO: 1635 - RNA, 21 nt, artificial
  Oligomer
acaacucaaugagcuuccugg

SEQ ID NO: 1636 - RNA, 21 nt, artificial
  Oligomer
cacaaguguucauccucaggg

SEQ ID NO: 1637 - RNA, 21 nt, artificial
  Oligomer
uuccuacucuuacauucaugc

SEQ ID NO: 1638 - RNA, 21 nt, artificial
  Oligomer
acacaaguguucauccucagg

SEQ ID NO: 1639 - RNA, 21 nt, artificial
  Oligomer
ucuucauguaaacaguucuag

SEQ ID NO: 1640 - RNA, 21 nt, artificial
  Oligomer
cuucauguaaacaguucuaga

SEQ ID NO: 1641 - RNA, 21 nt, artificial
  Oligomer
uucaagugucaaagaucccaa

SEQ ID NO: 1642 - RNA, 21 nt, artificial
  Oligomer
ugaugaacucagagugccgga

SEQ ID NO: 1643 - RNA, 21 nt, artificial
  Oligomer
uucuagauggaagacccagau

SEQ ID NO: 1644 - RNA, 21 nt, artificial
  Oligomer
gcuccgaucagaaaaacaaga

SEQ ID NO: 1645 - RNA, 21 nt, artificial
  Oligomer
acaaacaacaaacacacuugg

SEQ ID NO: 1646 - RNA, 21 nt, artificial
  Oligomer
acauccagcuggaagccuugu

SEQ ID NO: 1647 - RNA, 21 nt, artificial
  Oligomer
caucaaguguauucaugaaca

SEQ ID NO: 1648 - RNA, 21 nt, artificial
  Oligomer
auguaaacaguucuagaugga

SEQ ID NO: 1649 - RNA, 21 nt, artificial
  Oligomer
uaaacaguucuagauggaaga

SEQ ID NO: 1650 - RNA, 21 nt, artificial
  Oligomer
ugccagguguaauuuuucaag

SEQ ID NO: 1651 - RNA, 21 nt, artificial
  Oligomer
aaacaacaaacacacuugguc

SEQ ID NO: 1652 - RNA, 21 nt, artificial
  Oligomer
aacaacaaacacacuuggucc

SEQ ID NO: 1653 - RNA, 21 nt, artificial
  Oligomer
gauacacaaaccaccuccacg

SEQ ID NO: 1654 - RNA, 21 nt, artificial
  Oligomer
gcaucagguuggcacacaagu

SEQ ID NO: 1655 - RNA, 21 nt, artificial
  Oligomer
auucaugcgucuguaagauag

SEQ ID NO: 1656 - RNA, 21 nt, artificial
  Oligomer
acaacaggucaguagugaugc

SEQ ID NO: 1657 - RNA, 21 nt, artificial
  Oligomer
uuccaaccacaggaaucaguc

SEQ ID NO: 1658 - RNA, 21 nt, artificial
  Oligomer
uucaacacuccucaaugagca

SEQ ID NO: 1659 - RNA, 21 nt, artificial
  Oligomer
gaacaucaaguguauucauga

SEQ ID NO: 1660 - RNA, 21 nt, artificial
  Oligomer
uuucaagugucaaagauccca

SEQ ID NO: 1661 - RNA, 21 nt, artificial
  Oligomer
aacaaacaacaaacacacuug

SEQ ID NO: 1662 - RNA, 21 nt, artificial
  Oligomer
uucagaccaguaagauacaca

SEQ ID NO: 1663 - RNA, 21 nt, artificial
  Oligomer
ucagaccaguaagauacacaa

SEQ ID NO: 1664 - RNA, 21 nt, artificial
  Oligomer
aguaagauacacaaaccaccu

SEQ ID NO: 1665 - RNA, 21 nt, artificial
  Oligomer
augucacaccacuguuaacug

SEQ ID NO: 1666 - RNA, 21 nt, artificial
  Oligomer
agguacaugcuacacacacau

SEQ ID NO: 1667 - RNA, 21 nt, artificial
  Oligomer
aaccacaggaaucagucccuc

SEQ ID NO: 1668 - RNA, 21 nt, artificial
  Oligomer
cuguacagcuucuucuugaug

SEQ ID NO: 1669 - RNA, 21 nt, artificial
  Oligomer
ugaacagugaguaucuuaucu

SEQ ID NO: 1670 - RNA, 21 nt, artificial
  Oligomer
aacgcagcugccagguguaau

SEQ ID NO: 1671 - RNA, 21 nt, artificial
  Oligomer
cuuccuacucuuacauucaug

SEQ ID NO: 1672 - RNA, 21 nt, artificial
  Oligomer
auacacaaaccaccuccacga

SEQ ID NO: 1673 - RNA, 21 nt, artificial
  Oligomer
aaacaguucuagauggaagac

SEQ ID NO: 1674 - RNA, 21 nt, artificial
  Oligomer
aacaaacacacuuggucccuu

SEQ ID NO: 1675 - RNA, 21 nt, artificial
  Oligomer
aacacacuuggucccuucaga

SEQ ID NO: 1676 - RNA, 21 nt, artificial
  Oligomer
acaggaaucagucccucagcu

SEQ ID NO: 1677 - RNA, 21 nt, artificial
  Oligomer
uccgagcuguacagcuucuuc

SEQ ID NO: 1678 - RNA, 21 nt, artificial
  Oligomer
guaaacaguucuagauggaag

SEQ ID NO: 1679 - RNA, 21 nt, artificial
  Oligomer
ucaacucugcaguacacgaug

SEQ ID NO: 1680 - RNA, 21 nt, artificial
  Oligomer
agaccaguaagauacacaaac

SEQ ID NO: 1681 - RNA, 21 nt, artificial
  Oligomer
gccucaguuuuccaaccacag

SEQ ID NO: 1682 - RNA, 21 nt, artificial
  Oligomer
cucaaugagcagcuguuccga

SEQ ID NO: 1683 - RNA, 21 nt, artificial
  Oligomer
guuggcacacaaguguucauc

SEQ ID NO: 1684 - RNA, 21 nt, artificial
  Oligomer
uguucauccucagggucacug

SEQ ID NO: 1685 - RNA, 21 nt, artificial
  Oligomer
caaacaacaaacacacuuggu

SEQ ID NO: 1686 - RNA, 21 nt, artificial
  Oligomer
acaaacacacuuggucccuuc

SEQ ID NO: 1687 - RNA, 21 nt, artificial
  Oligomer
cacacaacucaaugagcuucc

SEQ ID NO: 1688 - RNA, 21 nt, artificial
  Oligomer
cccaaaaguucagucgucucu

SEQ ID NO: 1689 - RNA, 21 nt, artificial
  Oligomer
uaccaacuggcuaggcaucag

SEQ ID NO: 1690 - RNA, 21 nt, artificial
  Oligomer
aacucugcaguacacgauggg

SEQ ID NO: 1691 - RNA, 21 nt, artificial
  Oligomer
cugccagguguaauuuuucaa

SEQ ID NO: 1692 - RNA, 21 nt, artificial
  Oligomer
ucaagugucaaagaucccaag

SEQ ID NO: 1693 - RNA, 21 nt, artificial
  Oligomer
uaagauagcugccuacaacag

SEQ ID NO: 1694 - RNA, 21 nt, artificial
  Oligomer
cuccgaucagaaaaacaagau

SEQ ID NO: 1695 - RNA, 21 nt, artificial
  Oligomer
cauccagguaagccgugucuu

SEQ ID NO: 1696 - RNA, 21 nt, artificial
  Oligomer
caguaagauacacaaaccacc

SEQ ID NO: 1697 - RNA, 21 nt, artificial
  Oligomer
caugcuacacacacauccagc

SEQ ID NO: 1698 - RNA, 21 nt, artificial
  Oligomer
acacacacauccagcuggaag

SEQ ID NO: 1699 - RNA, 21 nt, artificial
  Oligomer
cauccagcuggaagccuuguu

SEQ ID NO: 1700 - RNA, 21 nt, artificial
  Oligomer
acccgcacacaacucaaugag

SEQ ID NO: 1701 - RNA, 21 nt, artificial
  Oligomer
cacaacucaaugagcuuccug

SEQ ID NO: 1702 - RNA, 21 nt, artificial
  Oligomer
uuaccaacuggcuaggcauca

SEQ ID NO: 1703 - RNA, 21 nt, artificial
  Oligomer
gcucaacucugcaguacacga

SEQ ID NO: 1704 - RNA, 21 nt, artificial
  Oligomer
gccagguguaauuuuucaagu

SEQ ID NO: 1705 - RNA, 21 nt, artificial
  Oligomer
aaagaucccaagugaucccug

SEQ ID NO: 1706 - RNA, 21 nt, artificial
  Oligomer
ucuuacauucaugcgucugua

SEQ ID NO: 1707 - RNA, 21 nt, artificial
  Oligomer
augcgucuguaagauagcugc

SEQ ID NO: 1708 - RNA, 21 nt, artificial
  Oligomer
guaagauagcugccuacaaca

SEQ ID NO: 1709 - RNA, 21 nt, artificial
  Oligomer
ccuacaacaggucaguaguga

SEQ ID NO: 1710 - RNA, 21 nt, artificial
  Oligomer
ugcuccgaucagaaaaacaag

SEQ ID NO: 1711 - RNA, 21 nt, artificial
  Oligomer
auccagguaagccgugucuuc

SEQ ID NO: 1712 - RNA, 21 nt, artificial
  Oligomer
cuucagaccaguaagauacac

SEQ ID NO: 1713 - RNA, 21 nt, artificial
  Oligomer
uacacaaaccaccuccacgac

SEQ ID NO: 1714 - RNA, 21 nt, artificial
  Oligomer
gucacaccacuguuaacuguc

SEQ ID NO: 1715 - RNA, 21 nt, artificial
  Oligomer
caccacuguuaacugucagua

SEQ ID NO: 1716 - RNA, 21 nt, artificial
  Oligomer
auaauaagguacaugcuacac

SEQ ID NO: 1717 - RNA, 21 nt, artificial
  Oligomer
aaugagcuuccugggaaacac

SEQ ID NO: 1718 - RNA, 21 nt, artificial
  Oligomer
guugaaguucaacacuccuca

SEQ ID NO: 1719 - RNA, 21 nt, artificial
  Oligomer
caacacuccucaaugagcagc

SEQ ID NO: 1720 - RNA, 21 nt, artificial
  Oligomer
aaacgcagcugccagguguaa

SEQ ID NO: 1721 - RNA, 21 nt, artificial
  Oligomer
caaacacacuuggucccuuca

SEQ ID NO: 1722 - RNA, 21 nt, artificial
  Oligomer
uaagauacacaaaccaccucc

SEQ ID NO: 1723 - RNA, 21 nt, artificial
  Oligomer
acacaacucaaugagcuuccu

SEQ ID NO: 1724 - RNA, 21 nt, artificial
  Oligomer
ggucagcgagaacugcuaaga

SEQ ID NO: 1725 - RNA, 21 nt, artificial
  Oligomer
ucaacacuccucaaugagcag

SEQ ID NO: 1726 - RNA, 21 nt, artificial
  Oligomer
gagaacugcuaagacaagugc

SEQ ID NO: 1727 - RNA, 21 nt, artificial
  Oligomer
ucaaguguauucaugaacagu

SEQ ID NO: 1728 - RNA, 21 nt, artificial
  Oligomer
aacagugaguaucuuaucuuc

SEQ ID NO: 1729 - RNA, 21 nt, artificial
  Oligomer
ucauguaaacaguucuagaug

SEQ ID NO: 1730 - RNA, 21 nt, artificial
  Oligomer
uguaaacaguucuagauggaa

SEQ ID NO: 1731 - RNA, 21 nt, artificial
  Oligomer
acgcagcugccagguguaauu

SEQ ID NO: 1732 - RNA, 21 nt, artificial
  Oligomer
agauagcugccuacaacaggu

SEQ ID NO: 1733 - RNA, 21 nt, artificial
  Oligomer
caacaaacacacuuggucccu

SEQ ID NO: 1734 - RNA, 21 nt, artificial
  Oligomer
acacacuuggucccuucagac

SEQ ID NO: 1735 - RNA, 21 nt, artificial
  Oligomer
aaaggcuaggcauggugagga

SEQ ID NO: 1736 - RNA, 21 nt, artificial
  Oligomer
uaauaagguacaugcuacaca

SEQ ID NO: 1737 - RNA, 21 nt, artificial
  Oligomer
guacaugcuacacacacaucc

SEQ ID NO: 1738 - RNA, 21 nt, artificial
  Oligomer
aaaaguucagucgucucuguc

SEQ ID NO: 1739 - RNA, 21 nt, artificial
  Oligomer
uguacagcuucuucuugauga

SEQ ID NO: 1740 - RNA, 21 nt, artificial
  Oligomer
gcugccagguguaauuuuuca

SEQ ID NO: 1741 - RNA, 21 nt, artificial
  Oligomer
caugcgucuguaagauagcug

SEQ ID NO: 1742 - RNA, 21 nt, artificial
  Oligomer
ugucacaccacuguuaacugu

SEQ ID NO: 1743 - RNA, 21 nt, artificial
  Oligomer
uuugcugaugaacucagagug

SEQ ID NO: 1744 - RNA, 21 nt, artificial
  Oligomer
ccaaaaguucagucgucucug

SEQ ID NO: 1745 - RNA, 21 nt, artificial
  Oligomer
cccucagguugaaguucaaca

SEQ ID NO: 1746 - RNA, 21 nt, artificial
  Oligomer
gcgagaacugcuaagacaagu

SEQ ID NO: 1747 - RNA, 21 nt, artificial
  Oligomer
cuucuucuugaugacucggaa

SEQ ID NO: 1748 - RNA, 21 nt, artificial
  Oligomer
acaucaaguguauucaugaac

SEQ ID NO: 1749 - RNA, 21 nt, artificial
  Oligomer
uuuucaagugucaaagauccc

SEQ ID NO: 1750 - RNA, 21 nt, artificial
  Oligomer
uacaacaggucaguagugaug

SEQ ID NO: 1751 - RNA, 21 nt, artificial
  Oligomer
agauacacaaaccaccuccac

SEQ ID NO: 1752 - RNA, 21 nt, artificial
  Oligomer
gaugucacaccacuguuaacu

SEQ ID NO: 1753 - RNA, 21 nt, artificial
  Oligomer
cguuugcugaugaacucagag

SEQ ID NO: 1754 - RNA, 21 nt, artificial
  Oligomer
guuucaugcuacaguacugag

SEQ ID NO: 1755 - RNA, 21 nt, artificial
  Oligomer
gcuuccugggaaacacuauuc

SEQ ID NO: 1756 - RNA, 21 nt, artificial
  Oligomer
uuuuccaaccacaggaaucag

SEQ ID NO: 1757 - RNA, 21 nt, artificial
  Oligomer
ccucagguugaaguucaacac

SEQ ID NO: 1758 - RNA, 21 nt, artificial
  Oligomer
cauaggucuuaauacuugaac

SEQ ID NO: 1759 - RNA, 21 nt, artificial
  Oligomer
gugucaaagaucccaagugau

SEQ ID NO: 1760 - RNA, 21 nt, artificial
  Oligomer
gucaaagaucccaagugaucc

SEQ ID NO: 1761 - RNA, 21 nt, artificial
  Oligomer
caaagaucccaagugaucccu

SEQ ID NO: 1762 - RNA, 21 nt, artificial
  Oligomer
uccuacucuuacauucaugcg

SEQ ID NO: 1763 - RNA, 21 nt, artificial
  Oligomer
aaacacacuuggucccuucag

SEQ ID NO: 1764 - RNA, 21 nt, artificial
  Oligomer
cccuucagaccaguaagauac

SEQ ID NO: 1765 - RNA, 21 nt, artificial
  Oligomer
cagaccaguaagauacacaaa

SEQ ID NO: 1766 - RNA, 21 nt, artificial
  Oligomer
gaccaguaagauacacaaacc

SEQ ID NO: 1767 - RNA, 21 nt, artificial
  Oligomer
cucuggaugucacaccacugu

SEQ ID NO: 1768 - RNA, 21 nt, artificial
  Oligomer
uaagguacaugcuacacacac

SEQ ID NO: 1769 - RNA, 21 nt, artificial
  Oligomer
gguacaugcuacacacacauc

SEQ ID NO: 1770 - RNA, 21 nt, artificial
  Oligomer
cuacacacacauccagcugga

SEQ ID NO: 1771 - RNA, 21 nt, artificial
  Oligomer
aguucagucgucucugucuug

SEQ ID NO: 1772 - RNA, 21 nt, artificial
  Oligomer
aacacuccucaaugagcagcu

SEQ ID NO: 1773 - RNA, 21 nt, artificial
  Oligomer
gcauaggucuuaauacuugaa

SEQ ID NO: 1774 - RNA, 21 nt, artificial
  Oligomer
uuggcacacaaguguucaucc

SEQ ID NO: 1775 - RNA, 21 nt, artificial
  Oligomer
augaacagugaguaucuuauc

SEQ ID NO: 1776 - RNA, 21 nt, artificial
  Oligomer
gguguaauuuuucaaguguca

SEQ ID NO: 1777 - RNA, 21 nt, artificial
  Oligomer
auagcugccuacaacagguca

SEQ ID NO: 1778 - RNA, 21 nt, artificial
  Oligomer
acaacaaacacacuugguccc

SEQ ID NO: 1779 - RNA, 21 nt, artificial
  Oligomer
uaagccuuuguuucaugcuac

SEQ ID NO: 1780 - RNA, 21 nt, artificial
  Oligomer
agcuuccugggaaacacuauu

SEQ ID NO: 1781 - RNA, 21 nt, artificial
  Oligomer
uugaaguucaacacuccucaa

SEQ ID NO: 1782 - RNA, 21 nt, artificial
  Oligomer
gaaguucaacacuccucaaug

SEQ ID NO: 1783 - RNA, 21 nt, artificial
  Oligomer
aguucuuugcccaccuggcuu

SEQ ID NO: 1784 - RNA, 21 nt, artificial
  Oligomer
ugaacaucaaguguauucaug

SEQ ID NO: 1785 - RNA, 21 nt, artificial
  Oligomer
cuacucuuacauucaugcguc

SEQ ID NO: 1786 - RNA, 21 nt, artificial
  Oligomer
uuacauucaugcgucuguaag

SEQ ID NO: 1787 - RNA, 21 nt, artificial
  Oligomer
ucuguaagauagcugccuaca

SEQ ID NO: 1788 - RNA, 21 nt, artificial
  Oligomer
uguaagauagcugccuacaac

SEQ ID NO: 1789 - RNA, 21 nt, artificial
  Oligomer
agugaugcuccgaucagaaaa

SEQ ID NO: 1790 - RNA, 21 nt, artificial
  Oligomer
augcuccgaucagaaaaacaa

SEQ ID NO: 1791 - RNA, 21 nt, artificial
  Oligomer
cgaucagaaaaacaagauaca

SEQ ID NO: 1792 - RNA, 21 nt, artificial
  Oligomer
cucucuggaugucacaccacu

SEQ ID NO: 1793 - RNA, 21 nt, artificial
  Oligomer
ugagcuuccugggaaacacua

SEQ ID NO: 1794 - RNA, 21 nt, artificial
  Oligomer
guuccgagcuguacagcuucu

SEQ ID NO: 1795 - RNA, 21 nt, artificial
  Oligomer
guucuagauggaagacccaga

SEQ ID NO: 1796 - RNA, 21 nt, artificial
  Oligomer
ugccagcucaacucugcagua

SEQ ID NO: 1797 - RNA, 21 nt, artificial
  Oligomer
uuaaacgcagcugccaggugu

SEQ ID NO: 1798 - RNA, 21 nt, artificial
  Oligomer
agcugcucucuggaugucaca

SEQ ID NO: 1799 - RNA, 21 nt, artificial
  Oligomer
cacaccacuguuaacugucag

SEQ ID NO: 1800 - RNA, 21 nt, artificial
  Oligomer
cacccgcacacaacucaauga

SEQ ID NO: 1801 - RNA, 21 nt, artificial
  Oligomer
cuuccugggaaacacuauucc

SEQ ID NO: 1802 - RNA, 21 nt, artificial
  Oligomer
uuuccaaccacaggaaucagu

SEQ ID NO: 1803 - RNA, 21 nt, artificial
  Oligomer
acuugaacaucaaguguauuc

SEQ ID NO: 1804 - RNA, 21 nt, artificial
  Oligomer
agugucaaagaucccaaguga

SEQ ID NO: 1805 - RNA, 21 nt, artificial
  Oligomer
ugucaaagaucccaagugauc

SEQ ID NO: 1806 - RNA, 21 nt, artificial
  Oligomer
ccuacucuuacauucaugcgu

SEQ ID NO: 1807 - RNA, 21 nt, artificial
  Oligomer
agcugccuacaacaggucagu

SEQ ID NO: 1808 - RNA, 21 nt, artificial
  Oligomer
aacugcuaagacaagugcguc

SEQ ID NO: 1809 - RNA, 21 nt, artificial
  Oligomer
guagugaugcuccgaucagaa

SEQ ID NO: 1810 - RNA, 21 nt, artificial
  Oligomer
uagugaugcuccgaucagaaa

SEQ ID NO: 1811 - RNA, 21 nt, artificial
  Oligomer
ccuucagaccaguaagauaca

SEQ ID NO: 1812 - RNA, 21 nt, artificial
  Oligomer
ccaguaagauacacaaaccac

SEQ ID NO: 1813 - RNA, 21 nt, artificial
  Oligomer
acaccacuguuaacugucagu

SEQ ID NO: 1814 - RNA, 21 nt, artificial
  Oligomer
ccuuuguuucaugcuacagua

SEQ ID NO: 1815 - RNA, 21 nt, artificial
  Oligomer
ccucaguuuuccaaccacagg

SEQ ID NO: 1816 - RNA, 21 nt, artificial
  Oligomer
caguaguucuuugcccaccug

SEQ ID NO: 1817 - RNA, 21 nt, artificial
  Oligomer
uuugcccaccuggcuuaccaa

SEQ ID NO: 1818 - RNA, 21 nt, artificial
  Oligomer
cuugaacaucaaguguauuca

SEQ ID NO: 1819 - RNA, 21 nt, artificial
  Oligomer
gugaguaucuuaucuucaugu

SEQ ID NO: 1820 - RNA, 21 nt, artificial
  Oligomer
acaguucuagauggaagaccc

SEQ ID NO: 1821 - RNA, 21 nt, artificial
  Oligomer
aguucuagauggaagacccag

SEQ ID NO: 1822 - RNA, 21 nt, artificial
  Oligomer
cacacaaguguucauccucag

SEQ ID NO: 1823 - RNA, 21 nt, artificial
  Oligomer
caagugucaaagaucccaagu

SEQ ID NO: 1824 - RNA, 21 nt, artificial
  Oligomer
uacucuuacauucaugcgucu

SEQ ID NO: 1825 - RNA, 21 nt, artificial
  Oligomer
cucuuacauucaugcgucugu

SEQ ID NO: 1826 - RNA, 21 nt, artificial
  Oligomer
cauucaugcgucuguaagaua

SEQ ID NO: 1827 - RNA, 21 nt, artificial
  Oligomer
uccgaucagaaaaacaagaua

SEQ ID NO: 1828 - RNA, 21 nt, artificial
  Oligomer
gucccuucagaccaguaagau

SEQ ID NO: 1829 - RNA, 21 nt, artificial
  Oligomer
ugcucucuggaugucacacca

SEQ ID NO: 1830 - RNA, 21 nt, artificial
  Oligomer
ucuggaugucacaccacuguu

SEQ ID NO: 1831 - RNA, 21 nt, artificial
  Oligomer
ucacaccacuguuaacuguca

SEQ ID NO: 1832 - RNA, 21 nt, artificial
  Oligomer
acacauccagcuggaagccuu

SEQ ID NO: 1833 - RNA, 21 nt, artificial
  Oligomer
uucaugcuacaguacugaggg

SEQ ID NO: 1834 - RNA, 21 nt, artificial
  Oligomer
augagcuuccugggaaacacu

SEQ ID NO: 1835 - RNA, 21 nt, artificial
  Oligomer
accacaggaaucagucccuca

SEQ ID NO: 1836 - RNA, 21 nt, artificial
  Oligomer
ugcuaagacaagugcguccug

SEQ ID NO: 1837 - RNA, 21 nt, artificial
  Oligomer
uccucaaugagcagcuguucc

SEQ ID NO: 1838 - RNA, 21 nt, artificial
  Oligomer
ucaaugagcagcuguuccgag

SEQ ID NO: 1839 - RNA, 21 nt, artificial
  Oligomer
uuccgagcuguacagcuucuu

SEQ ID NO: 1840 - RNA, 21 nt, artificial
  Oligomer
cgagaacugcuaagacaagug

SEQ ID NO: 1841 - RNA, 21 nt, artificial
  Oligomer
gagaguuggcggagcuaaaca

SEQ ID NO: 1842 - RNA, 21 nt, artificial
  Oligomer
caucagguuggcacacaagug

SEQ ID NO: 1843 - RNA, 21 nt, artificial
  Oligomer
agauggaagacccagauggca

SEQ ID NO: 1844 - RNA, 21 nt, artificial
  Oligomer
ucaaagaucccaagugauccc

SEQ ID NO: 1845 - RNA, 21 nt, artificial
  Oligomer
ccgaucagaaaaacaagauac

SEQ ID NO: 1846 - RNA, 21 nt, artificial
  Oligomer
acucaaugagcuuccugggaa

SEQ ID NO: 1847 - RNA, 21 nt, artificial
  Oligomer
ucaaugagcuuccugggaaac

SEQ ID NO: 1848 - RNA, 21 nt, artificial
  Oligomer
cucaguuuuccaaccacagga

SEQ ID NO: 1849 - RNA, 21 nt, artificial
  Oligomer
caaccacaggaaucagucccu

SEQ ID NO: 1850 - RNA, 21 nt, artificial
  Oligomer
aguucaacacuccucaaugag

SEQ ID NO: 1851 - RNA, 21 nt, artificial
  Oligomer
agcuucuucuugaugacucgg

SEQ ID NO: 1852 - RNA, 21 nt, artificial
  Oligomer
uucuuugcccaccuggcuuac

SEQ ID NO: 1853 - RNA, 21 nt, artificial
  Oligomer
aucagguuggcacacaagugu

SEQ ID NO: 1854 - RNA, 21 nt, artificial
  Oligomer
gaacagugaguaucuuaucuu

SEQ ID NO: 1855 - RNA, 21 nt, artificial
  Oligomer
ucuagauggaagacccagaug

SEQ ID NO: 1856 - RNA, 21 nt, artificial
  Oligomer
acauucaugcgucuguaagau

SEQ ID NO: 1857 - RNA, 21 nt, artificial
  Oligomer
guuugcugaugaacucagagu

SEQ ID NO: 1858 - RNA, 21 nt, artificial
  Oligomer
aacucaaugagcuuccuggga

SEQ ID NO: 1859 - RNA, 21 nt, artificial
  Oligomer
guucaacacuccucaaugagc

SEQ ID NO: 1860 - RNA, 21 nt, artificial
  Oligomer
guacagcuucuucuugaugac

SEQ ID NO: 1861 - RNA, 21 nt, artificial
  Oligomer
ucuugaugacucggaagccag

SEQ ID NO: 1862 - RNA, 21 nt, artificial
  Oligomer
accuggcuuaccaacuggcua

SEQ ID NO: 1863 - RNA, 21 nt, artificial
  Oligomer
agguuggcacacaaguguuca

SEQ ID NO: 1864 - RNA, 21 nt, artificial
  Oligomer
aggucuuaauacuugaacauc

SEQ ID NO: 1865 - RNA, 21 nt, artificial
  Oligomer
ucaugaacagugaguaucuua

SEQ ID NO: 1866 - RNA, 21 nt, artificial
  Oligomer
gaacugcuaagacaagugcgu

SEQ ID NO: 1867 - RNA, 21 nt, artificial
  Oligomer
aagaucccaagugaucccuga

SEQ ID NO: 1868 - RNA, 21 nt, artificial
  Oligomer
gcugccuacaacaggucagua

SEQ ID NO: 1869 - RNA, 21 nt, artificial
  Oligomer
aggucaguagugaugcuccga

SEQ ID NO: 1870 - RNA, 21 nt, artificial
  Oligomer
acuuggucccuucagaccagu

SEQ ID NO: 1871 - RNA, 21 nt, artificial
  Oligomer
accaguaagauacacaaacca

SEQ ID NO: 1872 - RNA, 21 nt, artificial
  Oligomer
uuucaugcuacaguacugagg

SEQ ID NO: 1873 - RNA, 21 nt, artificial
  Oligomer
ccgcacacaacucaaugagcu

SEQ ID NO: 1874 - RNA, 21 nt, artificial
  Oligomer
acacuccucaaugagcagcug

SEQ ID NO: 1875 - RNA, 21 nt, artificial
  Oligomer
ccgagcuguacagcuucuucu

SEQ ID NO: 1876 - RNA, 21 nt, artificial
  Oligomer
agcuguacagcuucuucuuga

SEQ ID NO: 1877 - RNA, 21 nt, artificial
  Oligomer
acagcuucuucuugaugacuc

SEQ ID NO: 1878 - RNA, 21 nt, artificial
  Oligomer
aguaguucuuugcccaccugg

SEQ ID NO: 1879 - RNA, 21 nt, artificial
  Oligomer
cuuaccaacuggcuaggcauc

SEQ ID NO: 1880 - RNA, 21 nt, artificial
  Oligomer
gcacacaaguguucauccuca

SEQ ID NO: 1881 - RNA, 21 nt, artificial
  Oligomer
cgcagcugccagguguaauuu

SEQ ID NO: 1882 - RNA, 21 nt, artificial
  Oligomer
acucuuacauucaugcgucug

SEQ ID NO: 1883 - RNA, 21 nt, artificial
  Oligomer
ucaugcgucuguaagauagcu

SEQ ID NO: 1884 - RNA, 21 nt, artificial
  Oligomer
uggucccuucagaccaguaag

SEQ ID NO: 1885 - RNA, 21 nt, artificial
  Oligomer
aagauacacaaaccaccucca

SEQ ID NO: 1886 - RNA, 21 nt, artificial
  Oligomer
auaagguacaugcuacacaca

SEQ ID NO: 1887 - RNA, 21 nt, artificial
  Oligomer
agccuuuguuucaugcuacag

SEQ ID NO: 1888 - RNA, 21 nt, artificial
  Oligomer
ugcugaugaacucagagugcc

SEQ ID NO: 1889 - RNA, 21 nt, artificial
  Oligomer
aaguucaacacuccucaauga

SEQ ID NO: 1890 - RNA, 21 nt, artificial
  Oligomer
cugcaucagguuggcacacaa

SEQ ID NO: 1891 - RNA, 21 nt, artificial
  Oligomer
uugcauaggucuuaauacuug

SEQ ID NO: 1892 - RNA, 21 nt, artificial
  Oligomer
acagugaguaucuuaucuuca

SEQ ID NO: 1893 - RNA, 21 nt, artificial
  Oligomer
cuagauggaagacccagaugg

SEQ ID NO: 1894 - RNA, 21 nt, artificial
  Oligomer
cagcucaacucugcaguacac

SEQ ID NO: 1895 - RNA, 21 nt, artificial
  Oligomer
uuuuucaagugucaaagaucc

SEQ ID NO: 1896 - RNA, 21 nt, artificial
  Oligomer
ccuuccuacucuuacauucau

SEQ ID NO: 1897 - RNA, 21 nt, artificial
  Oligomer
cuacaacaggucaguagugau

SEQ ID NO: 1898 - RNA, 21 nt, artificial
  Oligomer
gucaguagugaugcuccgauc

SEQ ID NO: 1899 - RNA, 21 nt, artificial
  Oligomer
ugaugcuccgaucagaaaaac

SEQ ID NO: 1900 - RNA, 21 nt, artificial
  Oligomer
guaagauacacaaaccaccuc

SEQ ID NO: 1901 - RNA, 21 nt, artificial
  Oligomer
accacuguuaacugucaguaa

SEQ ID NO: 1902 - RNA, 21 nt, artificial
  Oligomer
cuuuguuucaugcuacaguac

SEQ ID NO: 1903 - RNA, 21 nt, artificial
  Oligomer
gcacacaacucaaugagcuuc

SEQ ID NO: 1904 - RNA, 21 nt, artificial
  Oligomer
uuagguggcugccucaguuuu

SEQ ID NO: 1905 - RNA, 21 nt, artificial
  Oligomer
ucagcgagaacugcuaagaca

SEQ ID NO: 1906 - RNA, 21 nt, artificial
  Oligomer
uacagcuucuucuugaugacu

SEQ ID NO: 1907 - RNA, 21 nt, artificial
  Oligomer
agugaguaucuuaucuucaug

SEQ ID NO: 1908 - RNA, 21 nt, artificial
  Oligomer
agguguaauuuuucaaguguc

SEQ ID NO: 1909 - RNA, 21 nt, artificial
  Oligomer
aaguguucauccucaggguca

SEQ ID NO: 1910 - RNA, 21 nt, artificial
  Oligomer
aacaggucaguagugaugcuc

SEQ ID NO: 1911 - RNA, 21 nt, artificial
  Oligomer
guucauccucagggucacuga

SEQ ID NO: 1912 - RNA, 21 nt, artificial
  Oligomer
ggucccuucagaccaguaaga

SEQ ID NO: 1913 - RNA, 21 nt, artificial
  Oligomer
cagggcguuugcugaugaacu

SEQ ID NO: 1914 - RNA, 21 nt, artificial
  Oligomer
ucucuggaugucacaccacug

SEQ ID NO: 1915 - RNA, 21 nt, artificial
  Oligomer
aagguacaugcuacacacaca

SEQ ID NO: 1916 - RNA, 21 nt, artificial
  Oligomer
uacaugcuacacacacaucca

SEQ ID NO: 1917 - RNA, 21 nt, artificial
  Oligomer
acaugcuacacacacauccag

SEQ ID NO: 1918 - RNA, 21 nt, artificial
  Oligomer
uguuucaugcuacaguacuga

SEQ ID NO: 1919 - RNA, 21 nt, artificial
  Oligomer
guggcugccucaguuuuccaa

SEQ ID NO: 1920 - RNA, 21 nt, artificial
  Oligomer
ugaaguucaacacuccucaau

SEQ ID NO: 1921 - RNA, 21 nt, artificial
  Oligomer
cagcgagaacugcuaagacaa

SEQ ID NO: 1922 - RNA, 21 nt, artificial
  Oligomer
uauucaugaacagugaguauc

SEQ ID NO: 1923 - RNA, 21 nt, artificial
  Oligomer
cagcugccagguguaauuuuu

SEQ ID NO: 1924 - RNA, 21 nt, artificial
  Oligomer
ccagguguaauuuuucaagug

SEQ ID NO: 1925 - RNA, 21 nt, artificial
  Oligomer
aagugucaaagaucccaagug

SEQ ID NO: 1926 - RNA, 21 nt, artificial
  Oligomer
cuuacauucaugcgucuguaa

SEQ ID NO: 1927 - RNA, 21 nt, artificial
  Oligomer
ccuaagccuuuguuucaugcu

SEQ ID NO: 1928 - RNA, 21 nt, artificial
  Oligomer
caacucaaugagcuuccuggg

SEQ ID NO: 1929 - RNA, 21 nt, artificial
  Oligomer
caaugagcuuccugggaaaca

SEQ ID NO: 1930 - RNA, 21 nt, artificial
  Oligomer
caaaaguucagucgucucugu

SEQ ID NO: 1931 - RNA, 21 nt, artificial
  Oligomer
agaguuggcggagcuaaacag

SEQ ID NO: 1932 - RNA, 21 nt, artificial
  Oligomer
aucaaguguauucaugaacag

SEQ ID NO: 1933 - RNA, 21 nt, artificial
  Oligomer
auggaagacccagauggcacu

SEQ ID NO: 1934 - RNA, 21 nt, artificial
  Oligomer
acaaguguucauccucagggu

SEQ ID NO: 1935 - RNA, 21 nt, artificial
  Oligomer
ggucaguagugaugcuccgau

SEQ ID NO: 1936 - RNA, 21 nt, artificial
  Oligomer
uucauccucagggucacugag

SEQ ID NO: 1937 - RNA, 21 nt, artificial
  Oligomer
cuuggucccuucagaccagua

SEQ ID NO: 1938 - RNA, 21 nt, artificial
  Oligomer
uacacacacauccagcuggaa

SEQ ID NO: 1939 - RNA, 21 nt, artificial
  Oligomer
guuuuccaaccacaggaauca

SEQ ID NO: 1940 - RNA, 21 nt, artificial
  Oligomer
cucagguugaaguucaacacu

SEQ ID NO: 1941 - RNA, 21 nt, artificial
  Oligomer
acuccucaaugagcagcuguu

SEQ ID NO: 1942 - RNA, 21 nt, artificial
  Oligomer
agcgagaacugcuaagacaag

SEQ ID NO: 1943 - RNA, 21 nt, artificial
  Oligomer
gcuucuucuugaugacucgga

SEQ ID NO: 1944 - RNA, 21 nt, artificial
  Oligomer
ucaguagugaugcuccgauca

SEQ ID NO: 1945 - RNA, 21 nt, artificial
  Oligomer
aguagugaugcuccgaucaga

SEQ ID NO: 1946 - RNA, 21 nt, artificial
  Oligomer
cuaagccuuuguuucaugcua

SEQ ID NO: 1947 - RNA, 21 nt, artificial
  Oligomer
uugcugaugaacucagagugc

SEQ ID NO: 1948 - RNA, 21 nt, artificial
  Oligomer
gagcuuccugggaaacacuau

SEQ ID NO: 1949 - RNA, 21 nt, artificial
  Oligomer
aguuuuccaaccacaggaauc

SEQ ID NO: 1950 - RNA, 21 nt, artificial
  Oligomer
cugcuaagacaagugcguccu

SEQ ID NO: 1951 - RNA, 21 nt, artificial
  Oligomer
gcuuaccaacuggcuaggcau

SEQ ID NO: 1952 - RNA, 21 nt, artificial
  Oligomer
agaacugcuaagacaagugcg

SEQ ID NO: 1953 - RNA, 21 nt, artificial
  Oligomer
ggucuuaauacuugaacauca

SEQ ID NO: 1954 - RNA, 21 nt, artificial
  Oligomer
aacaguucuagauggaagacc

SEQ ID NO: 1955 - RNA, 21 nt, artificial
  Oligomer
uaaacgcagcugccaggugua

SEQ ID NO: 1956 - RNA, 21 nt, artificial
  Oligomer
agaucccaagugaucccugac

SEQ ID NO: 1957 - RNA, 21 nt, artificial
  Oligomer
aagauagcugccuacaacagg

SEQ ID NO: 1958 - RNA, 21 nt, artificial
  Oligomer
gccuacaacaggucaguagug

SEQ ID NO: 1959 - RNA, 21 nt, artificial
  Oligomer
acaggucaguagugaugcucc

SEQ ID NO: 1960 - RNA, 21 nt, artificial
  Oligomer
ccacuguuaacugucaguaac

SEQ ID NO: 1961 - RNA, 21 nt, artificial
  Oligomer
aagccuuuguuucaugcuaca

SEQ ID NO: 1962 - RNA, 21 nt, artificial
  Oligomer
cucaaugagcuuccugggaaa

SEQ ID NO: 1963 - RNA, 21 nt, artificial
  Oligomer
ugccucaguuuuccaaccaca

SEQ ID NO: 1964 - RNA, 21 nt, artificial
  Oligomer
uucagucgucucugucuugga

SEQ ID NO: 1965 - RNA, 21 nt, artificial
  Oligomer
gucagcgagaacugcuaagac

SEQ ID NO: 1966 - RNA, 21 nt, artificial
  Oligomer
gguugaaguucaacacuccuc

SEQ ID NO: 1967 - RNA, 21 nt, artificial
  Oligomer
cacuccucaaugagcagcugu

SEQ ID NO: 1968 - RNA, 21 nt, artificial
  Oligomer
aaguguauucaugaacaguga

SEQ ID NO: 1969 - RNA, 21 nt, artificial
  Oligomer
auucaugaacagugaguaucu

SEQ ID NO: 1970 - RNA, 21 nt, artificial
  Oligomer
agcugccagguguaauuuuuc

SEQ ID NO: 1971 - RNA, 21 nt, artificial
  Oligomer
cugccuacaacaggucaguag

SEQ ID NO: 1972 - RNA, 21 nt, artificial
  Oligomer
agggcguuugcugaugaacuc

SEQ ID NO: 1973 - RNA, 21 nt, artificial
  Oligomer
cuugaugacucggaagccagu

SEQ ID NO: 1974 - RNA, 21 nt, artificial
  Oligomer
gguuggcacacaaguguucau

SEQ ID NO: 1975 - RNA, 21 nt, artificial
  Oligomer
ugcauaggucuuaauacuuga

SEQ ID NO: 1976 - RNA, 21 nt, artificial
  Oligomer
gucuguaagauagcugccuac

SEQ ID NO: 1977 - RNA, 21 nt, artificial
  Oligomer
ugccuacaacaggucaguagu

SEQ ID NO: 1978 - RNA, 21 nt, artificial
  Oligomer
ucccuucagaccaguaagaua

SEQ ID NO: 1979 - RNA, 21 nt, artificial
  Oligomer
acuguuaacugucaguaacaa

SEQ ID NO: 1980 - RNA, 21 nt, artificial
  Oligomer
cuguuaacugucaguaacaaa

SEQ ID NO: 1981 - RNA, 21 nt, artificial
  Oligomer
ucagguugaaguucaacacuc

SEQ ID NO: 1982 - RNA, 21 nt, artificial
  Oligomer
cuggaugucacaccacuguua

SEQ ID NO: 1983 - RNA, 21 nt, artificial
  Oligomer
aaguucagucgucucugucuu

SEQ ID NO: 1984 - RNA, 21 nt, artificial
  Oligomer
agguugaaguucaacacuccu

SEQ ID NO: 1985 - RNA, 21 nt, artificial
  Oligomer
cuccucaaugagcagcuguuc

SEQ ID NO: 1986 - RNA, 21 nt, artificial
  Oligomer
guucuuugcccaccuggcuua

SEQ ID NO: 1987 - RNA, 21 nt, artificial
  Oligomer
caaguguauucaugaacagug

SEQ ID NO: 1988 - RNA, 21 nt, artificial
  Oligomer
cagugaguaucuuaucuucau

SEQ ID NO: 1989 - RNA, 21 nt, artificial
  Oligomer
cauguaaacaguucuagaugg

SEQ ID NO: 1990 - RNA, 21 nt, artificial
  Oligomer
ggcacacaaguguucauccuc

SEQ ID NO: 1991 - RNA, 21 nt, artificial
  Oligomer
cagguguaauuuuucaagugu

SEQ ID NO: 1992 - RNA, 21 nt, artificial
  Oligomer
cccuuccuacucuuacauuca

SEQ ID NO: 1993 - RNA, 21 nt, artificial
  Oligomer
caacaggucaguagugaugcu

SEQ ID NO: 1994 - RNA, 21 nt, artificial
  Oligomer
gaugcuccgaucagaaaaaca

SEQ ID NO: 1995 - RNA, 21 nt, artificial
  Oligomer
gcguuugcugaugaacucaga

SEQ ID NO: 1996 - RNA, 21 nt, artificial
  Oligomer
acugcuaagacaagugcgucc

SEQ ID NO: 1997 - RNA, 21 nt, artificial
  Oligomer
gccuuuguuucaugcuacagu

SEQ ID NO: 1998 - RNA, 21 nt, artificial
  Oligomer
cgcacacaacucaaugagcuu

SEQ ID NO: 1999 - RNA, 21 nt, artificial
  Oligomer
cagcuucuucuugaugacucg

SEQ ID NO: 2000 - RNA, 21 nt, artificial
  Oligomer
cuguaagauagcugccuacaa

SEQ ID NO: 2001 - RNA, 21 nt, artificial
  Oligomer
gauagcugccuacaacagguc

SEQ ID NO: 2002 - RNA, 21 nt, artificial
  Oligomer
uggaugucacaccacuguuaa

SEQ ID NO: 2003 - RNA, 21 nt, artificial
  Oligomer
uggcugccucaguuuuccaac

SEQ ID NO: 2004 - RNA, 21 nt, artificial
  Oligomer
ucuucuugaugacucggaagc

SEQ ID NO: 2005 - RNA, 21 nt, artificial
  Oligomer
ugcaucagguuggcacacaag

SEQ ID NO: 2006 - RNA, 21 nt, artificial
  Oligomer
guguauucaugaacagugagu

SEQ ID NO: 2007 - RNA, 21 nt, artificial
  Oligomer
ccagcucaacucugcaguaca

SEQ ID NO: 2008 - RNA, 21 nt, artificial
  Oligomer
guguucauccucagggucacu

SEQ ID NO: 2009 - RNA, 21 nt, artificial
  Oligomer
ugcuacacacacauccagcug

SEQ ID NO: 2010 - RNA, 21 nt, artificial
  Oligomer
aaugagcagcuguuccgagcu

SEQ ID NO: 2011 - RNA, 21 nt, artificial
  Oligomer
uagauggaagacccagauggc

SEQ ID NO: 2012 - RNA, 21 nt, artificial
  Oligomer
gaucccaagugaucccugaca

SEQ ID NO: 2013 - RNA, 21 nt, artificial
  Oligomer
cgucuguaagauagcugccua

SEQ ID NO: 2014 - RNA, 21 nt, artificial
  Oligomer
caguagugaugcuccgaucag

SEQ ID NO: 2015 - RNA, 21 nt, artificial
  Oligomer
uuguuucaugcuacaguacug

SEQ ID NO: 2016 - RNA, 21 nt, artificial
  Oligomer
cgagcuguacagcuucuucuu

SEQ ID NO: 2017 - RNA, 21 nt, artificial
  Oligomer
ucagguuggcacacaaguguu

SEQ ID NO: 2018 - RNA, 21 nt, artificial
  Oligomer
uccaaccacaggaaucagucc

SEQ ID NO: 2019 - RNA, 21 nt, artificial
  Oligomer
uguuccgagcuguacagcuuc

SEQ ID NO: 2020 - RNA, 21 nt, artificial
  Oligomer
uugaugacucggaagccagug

SEQ ID NO: 2021 - RNA, 21 nt, artificial
  Oligomer
uguauucaugaacagugagua

SEQ ID NO: 2022 - RNA, 21 nt, artificial
  Oligomer
uucaugaacagugaguaucuu

SEQ ID NO: 2023 - RNA, 21 nt, artificial
  Oligomer
uacauucaugcgucuguaaga

SEQ ID NO: 2024 - RNA, 21 nt, artificial
  Oligomer
gugaugcuccgaucagaaaaa

SEQ ID NO: 2025 - RNA, 21 nt, artificial
  Oligomer
cugccucaguuuuccaaccac

SEQ ID NO: 2026 - RNA, 21 nt, artificial
  Oligomer
uaguucuuugcccaccuggcu

SEQ ID NO: 2027 - RNA, 21 nt, artificial
  Oligomer
caaguguucauccucaggguc

SEQ ID NO: 2028 - RNA, 21 nt, artificial
  Oligomer
uuggucccuucagaccaguaa

SEQ ID NO: 2029 - RNA, 21 nt, artificial
  Oligomer
gggcguuugcugaugaacuca

SEQ ID NO: 2030 - RNA, 21 nt, artificial
  Oligomer
cacuguuaacugucaguaaca

SEQ ID NO: 2031 - RNA, 21 nt, artificial
  Oligomer
cuuagguggcugccucaguuu

SEQ ID NO: 2032 - RNA, 21 nt, artificial
  Oligomer
caguuuuccaaccacaggaau

SEQ ID NO: 2033 - RNA, 21 nt, artificial
  Oligomer
cuguuccgagcuguacagcuu

SEQ ID NO: 2034 - RNA, 21 nt, artificial
  Oligomer
uagcugccuacaacaggucag

SEQ ID NO: 2035 - RNA, 21 nt, artificial
  Oligomer
ucaguuuuccaaccacaggaa

SEQ ID NO: 2036 - RNA, 21 nt, artificial
  Oligomer
aaaguucagucgucucugucu

SEQ ID NO: 2037 - RNA, 21 nt, artificial
  Oligomer
gcaguaguucuuugcccaccu

SEQ ID NO: 2038 - RNA, 21 nt, artificial
  Oligomer
ggaugucacaccacuguuaac

SEQ ID NO: 2039 - RNA, 21 nt, artificial
  Oligomer
cagguugaaguucaacacucc

SEQ ID NO: 2040 - RNA, 21 nt, artificial
  Oligomer
gagcuguacagcuucuucuug

SEQ ID NO: 2041 - RNA, 21 nt, artificial
  Oligomer
guauucaugaacagugaguau

SEQ ID NO: 2042 - RNA, 21 nt, artificial
  Oligomer
uggcacacaaguguucauccu

SEQ ID NO: 2043 - RNA, 21 nt, artificial
  Oligomer
aaggcuuaaacgcagcugcca

SEQ ID NO: 2044 - RNA, 21 nt, artificial
  Oligomer
uucaugcgucuguaagauagc

SEQ ID NO: 2045 - RNA, 21 nt, artificial
  Oligomer
ggcguuugcugaugaacucag

SEQ ID NO: 2046 - RNA, 21 nt, artificial
  Oligomer
gcuguacagcuucuucuugau

SEQ ID NO: 2047 - RNA, 21 nt, artificial
  Oligomer
ugcgucuguaagauagcugcc

SEQ ID NO: 2048 - RNA, 21 nt, artificial
  Oligomer
gcgucuguaagauagcugccu

SEQ ID NO: 2049 - RNA, 21 nt, artificial
  Oligomer
uucuugaugacucggaagcca

SEQ ID NO: 2050 - RNA, 21 nt, artificial
  Oligomer
cagguuggcacacaaguguuc

SEQ ID NO: 2051 - RNA, 21 nt, artificial
  Oligomer
aguguauucaugaacagugag

SEQ ID NO: 2052 - RNA, 21 nt, artificial
  Oligomer
acacuuggucccuucagacca

SEQ ID NO: 2053 - RNA, 21 nt, artificial
  Oligomer
uucuucuugaugacucggaag

SEQ ID NO: 2054 - RNA, 21 nt, artificial
  Oligomer
aguguucauccucagggucac

SEQ ID NO: 2055 - RNA, 21 nt, artificial
  Oligomer
augcuacacacacauccagcu

SEQ ID NO: 2056 - RNA, 21 nt, artificial
  Oligomer
gcagcugccagguguaauuuu

SEQ ID NO: 2057 - RNA, 21 nt, artificial
  Oligomer
uuccugggaaacacuauuccc

SEQ ID NO: 2058 - RNA, 21 nt, artificial
  Oligomer
uagguggcugccucaguuuuc

SEQ ID NO: 2059 - RNA, 21 nt, artificial
  Oligomer
caguucuagauggaagaccca

SEQ ID NO: 2060 - RNA, 21 nt, artificial
  Oligomer
uuuguuucaugcuacaguacu

SEQ ID NO: 2061 - RNA, 21 nt, artificial
  Oligomer
gcugccucaguuuuccaacca

SEQ ID NO: 2062 - RNA, 21 nt, Artificial
  Oligomer
cuucuugaugacucggaagcc

SEQ ID NO: 2063 - RNA, 23 nt, artificial
  Oligomer
ccaggaagcucauugaguugugu

SEQ ID NO: 2064 - RNA, 23 nt, artificial
  Oligomer
cccaggaagcucauugaguugug

SEQ ID NO: 2065 - RNA, 23 nt, artificial
  Oligomer
ucccaggaagcucauugaguugu

SEQ ID NO: 2066 - RNA, 23 nt, artificial
  Oligomer
uucccaggaagcucauugaguug

SEQ ID NO: 2067 - RNA, 23 nt, artificial
  Oligomer
uuucccaggaagcucauugaguu

SEQ ID NO: 2068 - RNA, 23 nt, artificial
  Oligomer
auaagauacucacuguucaugaa

SEQ ID NO: 2069 - RNA, 23 nt, artificial
  Oligomer
gauaagauacucacuguucauga

SEQ ID NO: 2070 - RNA, 23 nt, artificial
  Oligomer
agauaagauacucacuguucaug

SEQ ID NO: 2071 - RNA, 23 nt, artificial
  Oligomer
aagauaagauacucacuguucau

SEQ ID NO: 2072 - RNA, 23 nt, artificial
  Oligomer
gaagauaagauacucacuguuca

SEQ ID NO: 2073 - RNA, 23 nt, artificial
  Oligomer
gcaugaaacaaaggcuuaggggc

SEQ ID NO: 2074 - RNA, 23 nt, artificial
  Oligomer
agcaugaaacaaaggcuuagggg

SEQ ID NO: 2075 - RNA, 23 nt, artificial
  Oligomer
uagcaugaaacaaaggcuuaggg

SEQ ID NO: 2076 - RNA, 23 nt, artificial
  Oligomer
guagcaugaaacaaaggcuuagg

SEQ ID NO: 2077 - RNA, 23 nt, artificial
  Oligomer
uguagcaugaaacaaaggcuuag

SEQ ID NO: 2078 - RNA, 23 nt, artificial
  Oligomer
ucaugaauacacuugauguucaa

SEQ ID NO: 2079 - RNA, 23 nt, artificial
  Oligomer
uucaugaauacacuugauguuca

SEQ ID NO: 2080 - RNA, 23 nt, artificial
  Oligomer
guucaugaauacacuugauguuc

SEQ ID NO: 2081 - RNA, 23 nt, artificial
  Oligomer
uguucaugaauacacuugauguu

SEQ ID NO: 2082 - RNA, 23 nt, artificial
  Oligomer
cuguucaugaauacacuugaugu

SEQ ID NO: 2083 - RNA, 23 nt, artificial
  Oligomer
gcaugaauguaagaguaggaagg

SEQ ID NO: 2084 - RNA, 23 nt, artificial
  Oligomer
cgcaugaauguaagaguaggaag

SEQ ID NO: 2085 - RNA, 23 nt, artificial
  Oligomer
acgcaugaauguaagaguaggaa

SEQ ID NO: 2086 - RNA, 23 nt, artificial
  Oligomer
gacgcaugaauguaagaguagga

SEQ ID NO: 2087 - RNA, 23 nt, artificial
  Oligomer
agacgcaugaauguaagaguagg

SEQ ID NO: 2088 - RNA, 23 nt, artificial
  Oligomer
guguguuuguuguuuguuuugua

SEQ ID NO: 2089 - RNA, 23 nt, artificial
  Oligomer
aguguguuuguuguuuguuuugu

SEQ ID NO: 2090 - RNA, 23 nt, artificial
  Oligomer
aaguguguuuguuguuuguuuug

SEQ ID NO: 2091 - RNA, 23 nt, artificial
  Oligomer
caaguguguuuguuguuuguuuu

SEQ ID NO: 2092 - RNA, 23 nt, artificial
  Oligomer
ccaaguguguuuguuguuuguuu

SEQ ID NO: 2093 - RNA, 23 nt, artificial
  Oligomer
agacgacugaacuuuuggggugg

SEQ ID NO: 2094 - RNA, 23 nt, artificial
  Oligomer
gagacgacugaacuuuuggggug

SEQ ID NO: 2095 - RNA, 23 nt, artificial
  Oligomer
agagacgacugaacuuuuggggu

SEQ ID NO: 2096 - RNA, 23 nt, artificial
  Oligomer
cagagacgacugaacuuuugggg

SEQ ID NO: 2097 - RNA, 23 nt, artificial
  Oligomer
acagagacgacugaacuuuuggg

SEQ ID NO: 2098 - RNA, 23 nt, artificial
  Oligomer
accaaguguguuuguuguuuguu

SEQ ID NO: 2099 - RNA, 23 nt, artificial
  Oligomer
gaccaaguguguuuguuguuugu

SEQ ID NO: 2100 - RNA, 23 nt, artificial
  Oligomer
ggaccaaguguguuuguuguuug

SEQ ID NO: 2101 - RNA, 23 nt, artificial
  Oligomer
gggaccaaguguguuuguuguuu

SEQ ID NO: 2102 - RNA, 23 nt, artificial
  Oligomer
cguggaggugguuuguguaucuu

SEQ ID NO: 2103 - RNA, 23 nt, artificial
  Oligomer
ucguggaggugguuuguguaucu

SEQ ID NO: 2104 - RNA, 23 nt, artificial
  Oligomer
gucguggaggugguuuguguauc

SEQ ID NO: 2105 - RNA, 23 nt, artificial
  Oligomer
ggucguggaggugguuuguguau

SEQ ID NO: 2106 - RNA, 23 nt, artificial
  Oligomer
aggucguggaggugguuugugua

SEQ ID NO: 2107 - RNA, 23 nt, artificial
  Oligomer
acaugaagauaagauacucacug

SEQ ID NO: 2108 - RNA, 23 nt, artificial
  Oligomer
uacaugaagauaagauacucacu

SEQ ID NO: 2109 - RNA, 23 nt, artificial
  Oligomer
uuacaugaagauaagauacucac

SEQ ID NO: 2110 - RNA, 23 nt, artificial
  Oligomer
uuuacaugaagauaagauacuca

SEQ ID NO: 2111 - RNA, 23 nt, artificial
  Oligomer
guuuacaugaagauaagauacuc

SEQ ID NO: 2112 - RNA, 23 nt, artificial
  Oligomer
agggaccaaguguguuuguuguu

SEQ ID NO: 2113 - RNA, 23 nt, artificial
  Oligomer
aagggaccaaguguguuuguugu

SEQ ID NO: 2114 - RNA, 23 nt, artificial
  Oligomer
gaggucguggaggugguuugugu

SEQ ID NO: 2115 - RNA, 23 nt, artificial
  Oligomer
aacagcugcucauugaggagugu

SEQ ID NO: 2116 - RNA, 23 nt, artificial
  Oligomer
gaacagcugcucauugaggagug

SEQ ID NO: 2117 - RNA, 23 nt, artificial
  Oligomer
ggaacagcugcucauugaggagu

SEQ ID NO: 2118 - RNA, 23 nt, artificial
  Oligomer
cggaacagcugcucauugaggag

SEQ ID NO: 2119 - RNA, 23 nt, artificial
  Oligomer
ucggaacagcugcucauugagga

SEQ ID NO: 2120 - RNA, 23 nt, artificial
  Oligomer
guaucuuacuggucugaagggac

SEQ ID NO: 2121 - RNA, 23 nt, artificial
  Oligomer
uguaucuuacuggucugaaggga

SEQ ID NO: 2122 - RNA, 23 nt, artificial
  Oligomer
guguaucuuacuggucugaaggg

SEQ ID NO: 2123 - RNA, 23 nt, artificial
  Oligomer
uguguaucuuacuggucugaagg

SEQ ID NO: 2124 - RNA, 23 nt, artificial
  Oligomer
uuguguaucuuacuggucugaag

SEQ ID NO: 2125 - RNA, 23 nt, artificial
  Oligomer
uuuguguaucuuacuggucugaa

SEQ ID NO: 2126 - RNA, 23 nt, artificial
  Oligomer
guuuguguaucuuacuggucuga

SEQ ID NO: 2127 - RNA, 23 nt, artificial
  Oligomer
gguuuguguaucuuacuggucug

SEQ ID NO: 2128 - RNA, 23 nt, artificial
  Oligomer
ugguuuguguaucuuacuggucu

SEQ ID NO: 2129 - RNA, 23 nt, artificial
  Oligomer
gugugacauccagagagcagcug

SEQ ID NO: 2130 - RNA, 23 nt, artificial
  Oligomer
ggugugacauccagagagcagcu

SEQ ID NO: 2131 - RNA, 23 nt, artificial
  Oligomer
uggugugacauccagagagcagc

SEQ ID NO: 2132 - RNA, 23 nt, artificial
  Oligomer
guggugugacauccagagagcag

SEQ ID NO: 2133 - RNA, 23 nt, artificial
  Oligomer
aguggugugacauccagagagca

SEQ ID NO: 2134 - RNA, 23 nt, artificial
  Oligomer
gaagcucauugaguugugugcgg

SEQ ID NO: 2135 - RNA, 23 nt, artificial
  Oligomer
ggaagcucauugaguugugugcg

SEQ ID NO: 2136 - RNA, 23 nt, artificial
  Oligomer
aggaagcucauugaguugugugc

SEQ ID NO: 2137 - RNA, 23 nt, artificial
  Oligomer
caggaagcucauugaguugugug

SEQ ID NO: 2138 - RNA, 23 nt, artificial
  Oligomer
gacugauuccugugguuggaaaa

SEQ ID NO: 2139 - RNA, 23 nt, artificial
  Oligomer
ggacugauuccugugguuggaaa

SEQ ID NO: 2140 - RNA, 23 nt, artificial
  Oligomer
gggacugauuccugugguuggaa

SEQ ID NO: 2141 - RNA, 23 nt, artificial
  Oligomer
agggacugauuccugugguugga

SEQ ID NO: 2142 - RNA, 23 nt, artificial
  Oligomer
gagggacugauuccugugguugg

SEQ ID NO: 2143 - RNA, 23 nt, artificial
  Oligomer
ugaggaugaacacuugugugcca

SEQ ID NO: 2144 - RNA, 23 nt, artificial
  Oligomer
cugaggaugaacacuugugugcc

SEQ ID NO: 2145 - RNA, 23 nt, artificial
  Oligomer
ccugaggaugaacacuugugugc

SEQ ID NO: 2146 - RNA, 23 nt, artificial
  Oligomer
cccugaggaugaacacuugugug

SEQ ID NO: 2147 - RNA, 23 nt, artificial
  Oligomer
acccugaggaugaacacuugugu

SEQ ID NO: 2148 - RNA, 23 nt, artificial
  Oligomer
ggaucuuugacacuugaaaaauu

SEQ ID NO: 2149 - RNA, 23 nt, artificial
  Oligomer
gggaucuuugacacuugaaaaau

SEQ ID NO: 2150 - RNA, 23 nt, artificial
  Oligomer
ugggaucuuugacacuugaaaaa

SEQ ID NO: 2151 - RNA, 23 nt, artificial
  Oligomer
uugggaucuuugacacuugaaaa

SEQ ID NO: 2152 - RNA, 23 nt, artificial
  Oligomer
cuugggaucuuugacacuugaaa

SEQ ID NO: 2153 - RNA, 23 nt, artificial
  Oligomer
cauugaguugugugcggguggcu

SEQ ID NO: 2154 - RNA, 23 nt, artificial
  Oligomer
ucauugaguugugugcggguggc

SEQ ID NO: 2155 - RNA, 23 nt, artificial
  Oligomer
cucauugaguugugugcgggugg

SEQ ID NO: 2156 - RNA, 23 nt, artificial
  Oligomer
gcucauugaguugugugcgggug

SEQ ID NO: 2157 - RNA, 23 nt, artificial
  Oligomer
agcucauugaguugugugcgggu

SEQ ID NO: 2158 - RNA, 23 nt, artificial
  Oligomer
cauugaggaguguugaacuucaa

SEQ ID NO: 2159 - RNA, 23 nt, artificial
  Oligomer
ucauugaggaguguugaacuuca

SEQ ID NO: 2160 - RNA, 23 nt, artificial
  Oligomer
cucauugaggaguguugaacuuc

SEQ ID NO: 2161 - RNA, 23 nt, artificial
  Oligomer
gcucauugaggaguguugaacuu

SEQ ID NO: 2162 - RNA, 23 nt, artificial
  Oligomer
ugcucauugaggaguguugaacu

SEQ ID NO: 2163 - RNA, 23 nt, artificial
  Oligomer
caucaagaagaagcuguacagcu

SEQ ID NO: 2164 - RNA, 23 nt, artificial
  Oligomer
ucaucaagaagaagcuguacagc

SEQ ID NO: 2165 - RNA, 23 nt, artificial
  Oligomer
gucaucaagaagaagcuguacag

SEQ ID NO: 2166 - RNA, 23 nt, artificial
  Oligomer
agucaucaagaagaagcuguaca

SEQ ID NO: 2167 - RNA, 23 nt, artificial
  Oligomer
gagucaucaagaagaagcuguac

SEQ ID NO: 2168 - RNA, 23 nt, artificial
  Oligomer
cguguacugcagaguugagcugg

SEQ ID NO: 2169 - RNA, 23 nt, artificial
  Oligomer
ucguguacugcagaguugagcug

SEQ ID NO: 2170 - RNA, 23 nt, artificial
  Oligomer
aucguguacugcagaguugagcu

SEQ ID NO: 2171 - RNA, 23 nt, artificial
  Oligomer
caucguguacugcagaguugagc

SEQ ID NO: 2172 - RNA, 23 nt, artificial
  Oligomer
ccaucguguacugcagaguugag

SEQ ID NO: 2173 - RNA, 23 nt, artificial
  Oligomer
cccaucguguacugcagaguuga

SEQ ID NO: 2174 - RNA, 23 nt, artificial
  Oligomer
caugaauguaagaguaggaaggg

SEQ ID NO: 2175 - RNA, 23 nt, artificial
  Oligomer
guaggcagcuaucuuacagacgc

SEQ ID NO: 2176 - RNA, 23 nt, artificial
  Oligomer
uguaggcagcuaucuuacagacg

SEQ ID NO: 2177 - RNA, 23 nt, artificial
  Oligomer
uuguaggcagcuaucuuacagac

SEQ ID NO: 2178 - RNA, 23 nt, artificial
  Oligomer
guuguaggcagcuaucuuacaga

SEQ ID NO: 2179 - RNA, 23 nt, artificial
  Oligomer
uguuguaggcagcuaucuuacag

SEQ ID NO: 2180 - RNA, 23 nt, artificial
  Oligomer
cuguuguaggcagcuaucuuaca

SEQ ID NO: 2181 - RNA, 23 nt, artificial
  Oligomer
ccuguuguaggcagcuaucuuac

SEQ ID NO: 2182 - RNA, 23 nt, artificial
  Oligomer
accuguuguaggcagcuaucuua

SEQ ID NO: 2183 - RNA, 23 nt, artificial
  Oligomer
gaccuguuguaggcagcuaucuu

SEQ ID NO: 2184 - RNA, 23 nt, artificial
  Oligomer
ugaccuguuguaggcagcuaucu

SEQ ID NO: 2185 - RNA, 23 nt, artificial
  Oligomer
ucuuguuuuucugaucggagcau

SEQ ID NO: 2186 - RNA, 23 nt, artificial
  Oligomer
aucuuguuuuucugaucggagca

SEQ ID NO: 2187 - RNA, 23 nt, artificial
  Oligomer
uaucuuguuuuucugaucggagc

SEQ ID NO: 2188 - RNA, 23 nt, artificial
  Oligomer
guaucuuguuuuucugaucggag

SEQ ID NO: 2189 - RNA, 23 nt, artificial
  Oligomer
uguaucuuguuuuucugaucgga

SEQ ID NO: 2190 - RNA, 23 nt, artificial
  Oligomer
ugaagggaccaaguguguuuguu

SEQ ID NO: 2191 - RNA, 23 nt, artificial
  Oligomer
cugaagggaccaaguguguuugu

SEQ ID NO: 2192 - RNA, 23 nt, artificial
  Oligomer
ucugaagggaccaaguguguuug

SEQ ID NO: 2193 - RNA, 23 nt, artificial
  Oligomer
gucugaagggaccaaguguguuu

SEQ ID NO: 2194 - RNA, 23 nt, artificial
  Oligomer
ggucugaagggaccaaguguguu

SEQ ID NO: 2195 - RNA, 23 nt, artificial
  Oligomer
aguuaacaguggugugacaucca

SEQ ID NO: 2196 - RNA, 23 nt, artificial
  Oligomer
caguuaacaguggugugacaucc

SEQ ID NO: 2197 - RNA, 23 nt, artificial
  Oligomer
acaguuaacaguggugugacauc

SEQ ID NO: 2198 - RNA, 23 nt, artificial
  Oligomer
gacaguuaacaguggugugacau

SEQ ID NO: 2199 - RNA, 23 nt, artificial
  Oligomer
ugacaguuaacaguggugugaca

SEQ ID NO: 2200 - RNA, 23 nt, artificial
  Oligomer
uguagcauguaccuuauuauuuu

SEQ ID NO: 2201 - RNA, 23 nt, artificial
  Oligomer
guguagcauguaccuuauuauuu

SEQ ID NO: 2202 - RNA, 23 nt, artificial
  Oligomer
uguguagcauguaccuuauuauu

SEQ ID NO: 2203 - RNA, 23 nt, artificial
  Oligomer
guguguagcauguaccuuauuau

SEQ ID NO: 2204 - RNA, 23 nt, artificial
  Oligomer
uguguguagcauguaccuuauua

SEQ ID NO: 2205 - RNA, 23 nt, artificial
  Oligomer
caucuagaacuguuuacaugaag

SEQ ID NO: 2206 - RNA, 23 nt, artificial
  Oligomer
ccaucuagaacuguuuacaugaa

SEQ ID NO: 2207 - RNA, 23 nt, artificial
  Oligomer
uccaucuagaacuguuuacauga

SEQ ID NO: 2208 - RNA, 23 nt, artificial
  Oligomer
uuccaucuagaacuguuuacaug

SEQ ID NO: 2209 - RNA, 23 nt, artificial
  Oligomer
cuuccaucuagaacuguuuacau

SEQ ID NO: 2210 - RNA, 23 nt, artificial
  Oligomer
ucuuccaucuagaacuguuuaca

SEQ ID NO: 2211 - RNA, 23 nt, artificial
  Oligomer
gucuuccaucuagaacuguuuac

SEQ ID NO: 2212 - RNA, 23 nt, artificial
  Oligomer
ggucuuccaucuagaacuguuua

SEQ ID NO: 2213 - RNA, 23 nt, artificial
  Oligomer
cuuacagacgcaugaauguaaga

SEQ ID NO: 2214 - RNA, 23 nt, artificial
  Oligomer
ucuuacagacgcaugaauguaag

SEQ ID NO: 2215 - RNA, 23 nt, artificial
  Oligomer
aucuuacagacgcaugaauguaa

SEQ ID NO: 2216 - RNA, 23 nt, artificial
  Oligomer
uaucuuacagacgcaugaaugua

SEQ ID NO: 2217 - RNA, 23 nt, artificial
  Oligomer
cuaucuuacagacgcaugaaugu

SEQ ID NO: 2218 - RNA, 23 nt, artificial
  Oligomer
uucugaucggagcaucacuacug

SEQ ID NO: 2219 - RNA, 23 nt, artificial
  Oligomer
uuucugaucggagcaucacuacu

SEQ ID NO: 2220 - RNA, 23 nt, artificial
  Oligomer
uuuucugaucggagcaucacuac

SEQ ID NO: 2221 - RNA, 23 nt, artificial
  Oligomer
uuuuucugaucggagcaucacua

SEQ ID NO: 2222 - RNA, 23 nt, artificial
  Oligomer
guuuuucugaucggagcaucacu

SEQ ID NO: 2223 - RNA, 23 nt, artificial
  Oligomer
gcaggacgcacuugucuuagcag

SEQ ID NO: 2224 - RNA, 23 nt, artificial
  Oligomer
ggcaggacgcacuugucuuagca

SEQ ID NO: 2225 - RNA, 23 nt, artificial
  Oligomer
cggcaggacgcacuugucuuagc

SEQ ID NO: 2226 - RNA, 23 nt, artificial
  Oligomer
gcggcaggacgcacuugucuuag

SEQ ID NO: 2227 - RNA, 23 nt, artificial
  Oligomer
agcggcaggacgcacuugucuua

SEQ ID NO: 2228 - RNA, 23 nt, artificial
  Oligomer
gaugccuagccaguugguaagcc

SEQ ID NO: 2229 - RNA, 23 nt, artificial
  Oligomer
ugaugccuagccaguugguaagc

SEQ ID NO: 2230 - RNA, 23 nt, artificial
  Oligomer
cugaugccuagccaguugguaag

SEQ ID NO: 2231 - RNA, 23 nt, artificial
  Oligomer
gcugaugccuagccaguugguaa

SEQ ID NO: 2232 - RNA, 23 nt, artificial
  Oligomer
ugcugaugccuagccaguuggua

SEQ ID NO: 2233 - RNA, 23 nt, artificial
  Oligomer
acuugugugccaaccugaugcag

SEQ ID NO: 2234 - RNA, 23 nt, artificial
  Oligomer
cacuugugugccaaccugaugca

SEQ ID NO: 2235 - RNA, 23 nt, artificial
  Oligomer
acacuugugugccaaccugaugc

SEQ ID NO: 2236 - RNA, 23 nt, artificial
  Oligomer
aacacuugugugccaaccugaug

SEQ ID NO: 2237 - RNA, 23 nt, artificial
  Oligomer
gaacacuugugugccaaccugau

SEQ ID NO: 2238 - RNA, 23 nt, artificial
  Oligomer
gaauacacuugauguucaaguau

SEQ ID NO: 2239 - RNA, 23 nt, artificial
  Oligomer
ugaauacacuugauguucaagua

SEQ ID NO: 2240 - RNA, 23 nt, artificial
  Oligomer
augaauacacuugauguucaagu

SEQ ID NO: 2241 - RNA, 23 nt, artificial
  Oligomer
caugaauacacuugauguucaag

SEQ ID NO: 2242 - RNA, 23 nt, artificial
  Oligomer
gaagggaccaaguguguuuguug

SEQ ID NO: 2243 - RNA, 23 nt, artificial
  Oligomer
auguguguguagcauguaccuua

SEQ ID NO: 2244 - RNA, 23 nt, artificial
  Oligomer
gauguguguguagcauguaccuu

SEQ ID NO: 2245 - RNA, 23 nt, artificial
  Oligomer
ggauguguguguagcauguaccu

SEQ ID NO: 2246 - RNA, 23 nt, artificial
  Oligomer
uggauguguguguagcauguacc

SEQ ID NO: 2247 - RNA, 23 nt, artificial
  Oligomer
cuggauguguguguagcauguac

SEQ ID NO: 2248 - RNA, 23 nt, artificial
  Oligomer
accuggcagcugcguuuaagccu

SEQ ID NO: 2249 - RNA, 23 nt, artificial
  Oligomer
caccuggcagcugcguuuaagcc

SEQ ID NO: 2250 - RNA, 23 nt, artificial
  Oligomer
acaccuggcagcugcguuuaagc

SEQ ID NO: 2251 - RNA, 23 nt, artificial
  Oligomer
uacaccuggcagcugcguuuaag

SEQ ID NO: 2252 - RNA, 23 nt, artificial
  Oligomer
uuacaccuggcagcugcguuuaa

SEQ ID NO: 2253 - RNA, 23 nt, artificial
  Oligomer
gucagggaucacuugggaucuuu

SEQ ID NO: 2254 - RNA, 23 nt, artificial
  Oligomer
ugucagggaucacuugggaucuu

SEQ ID NO: 2255 - RNA, 23 nt, artificial
  Oligomer
gugucagggaucacuugggaucu

SEQ ID NO: 2256 - RNA, 23 nt, artificial
  Oligomer
ggugucagggaucacuugggauc

SEQ ID NO: 2257 - RNA, 23 nt, artificial
  Oligomer
gggugucagggaucacuugggau

SEQ ID NO: 2258 - RNA, 23 nt, artificial
  Oligomer
ucaccaugccuagccuuugggac

SEQ ID NO: 2259 - RNA, 23 nt, artificial
  Oligomer
cucaccaugccuagccuuuggga

SEQ ID NO: 2260 - RNA, 23 nt, artificial
  Oligomer
ccucaccaugccuagccuuuggg

SEQ ID NO: 2261 - RNA, 23 nt, artificial
  Oligomer
uccucaccaugccuagccuuugg

SEQ ID NO: 2262 - RNA, 23 nt, artificial
  Oligomer
guccucaccaugccuagccuuug

SEQ ID NO: 2263 - RNA, 23 nt, artificial
  Oligomer
uuguuuuucugaucggagcauca

SEQ ID NO: 2264 - RNA, 23 nt, artificial
  Oligomer
cuuguuuuucugaucggagcauc

SEQ ID NO: 2265 - RNA, 23 nt, artificial
  Oligomer
cggcacucugaguucaucagcaa

SEQ ID NO: 2266 - RNA, 23 nt, artificial
  Oligomer
ccggcacucugaguucaucagca

SEQ ID NO: 2267 - RNA, 23 nt, artificial
  Oligomer
uccggcacucugaguucaucagc

SEQ ID NO: 2268 - RNA, 23 nt, artificial
  Oligomer
cuccggcacucugaguucaucag

SEQ ID NO: 2269 - RNA, 23 nt, artificial
  Oligomer
gcuccggcacucugaguucauca

SEQ ID NO: 2270 - RNA, 23 nt, artificial
  Oligomer
guuucccaggaagcucauugagu

SEQ ID NO: 2271 - RNA, 23 nt, artificial
  Oligomer
uguuucccaggaagcucauugag

SEQ ID NO: 2272 - RNA, 23 nt, artificial
  Oligomer
guguuucccaggaagcucauuga

SEQ ID NO: 2273 - RNA, 23 nt, artificial
  Oligomer
aguguuucccaggaagcucauug

SEQ ID NO: 2274 - RNA, 23 nt, artificial
  Oligomer
uaguguuucccaggaagcucauu

SEQ ID NO: 2275 - RNA, 23 nt, artificial
  Oligomer
cugugguuggaaaacugaggcag

SEQ ID NO: 2276 - RNA, 23 nt, artificial
  Oligomer
ccugugguuggaaaacugaggca

SEQ ID NO: 2277 - RNA, 23 nt, artificial
  Oligomer
uccugugguuggaaaacugaggc

SEQ ID NO: 2278 - RNA, 23 nt, artificial
  Oligomer
uuccugugguuggaaaacugagg

SEQ ID NO: 2279 - RNA, 23 nt, artificial
  Oligomer
auuccugugguuggaaaacugag

SEQ ID NO: 2280 - RNA, 23 nt, artificial
  Oligomer
acuugucuuagcaguucucgcug

SEQ ID NO: 2281 - RNA, 23 nt, artificial
  Oligomer
cacuugucuuagcaguucucgcu

SEQ ID NO: 2282 - RNA, 23 nt, artificial
  Oligomer
gcacuugucuuagcaguucucgc

SEQ ID NO: 2283 - RNA, 23 nt, artificial
  Oligomer
cgcacuugucuuagcaguucucg

SEQ ID NO: 2284 - RNA, 23 nt, artificial
  Oligomer
acgcacuugucuuagcaguucuc

SEQ ID NO: 2285 - RNA, 23 nt, artificial
  Oligomer
ccaucugggucuuccaucuagaa

SEQ ID NO: 2286 - RNA, 23 nt, artificial
  Oligomer
gccaucugggucuuccaucuaga

SEQ ID NO: 2287 - RNA, 23 nt, artificial
  Oligomer
ugccaucugggucuuccaucuag

SEQ ID NO: 2288 - RNA, 23 nt, artificial
  Oligomer
gugccaucugggucuuccaucua

SEQ ID NO: 2289 - RNA, 23 nt, artificial
  Oligomer
agugccaucugggucuuccaucu

SEQ ID NO: 2290 - RNA, 23 nt, artificial
  Oligomer
aucacuugggaucuuugacacuu

SEQ ID NO: 2291 - RNA, 23 nt, artificial
  Oligomer
gaucacuugggaucuuugacacu

SEQ ID NO: 2292 - RNA, 23 nt, artificial
  Oligomer
ggaucacuugggaucuuugacac

SEQ ID NO: 2293 - RNA, 23 nt, artificial
  Oligomer
gggaucacuugggaucuuugaca

SEQ ID NO: 2294 - RNA, 23 nt, artificial
  Oligomer
agggaucacuugggaucuuugac

SEQ ID NO: 2295 - RNA, 23 nt, artificial
  Oligomer
cucugaguucaucagcaaacgcc

SEQ ID NO: 2296 - RNA, 23 nt, artificial
  Oligomer
acucugaguucaucagcaaacgc

SEQ ID NO: 2297 - RNA, 23 nt, artificial
  Oligomer
cacucugaguucaucagcaaacg

SEQ ID NO: 2298 - RNA, 23 nt, artificial
  Oligomer
gcacucugaguucaucagcaaac

SEQ ID NO: 2299 - RNA, 23 nt, artificial
  Oligomer
ggcacucugaguucaucagcaaa

SEQ ID NO: 2300 - RNA, 23 nt, artificial
  Oligomer
guagcauguaccuuauuauuuuu

SEQ ID NO: 2301 - RNA, 23 nt, artificial
  Oligomer
ccagcuggauguguguguagcau

SEQ ID NO: 2302 - RNA, 23 nt, artificial
  Oligomer
uccagcuggauguguguguagca

SEQ ID NO: 2303 - RNA, 23 nt, artificial
  Oligomer
uuccagcuggauguguguguagc

SEQ ID NO: 2304 - RNA, 23 nt, artificial
  Oligomer
cuuccagcuggauguguguguag

SEQ ID NO: 2305 - RNA, 23 nt, artificial
  Oligomer
gcuuccagcuggaugugugugua

SEQ ID NO: 2306 - RNA, 23 nt, artificial
  Oligomer
gacccugaggaugaacacuugug

SEQ ID NO: 2307 - RNA, 23 nt, artificial
  Oligomer
ugacccugaggaugaacacuugu

SEQ ID NO: 2308 - RNA, 23 nt, artificial
  Oligomer
acuguucaugaauacacuugaug

SEQ ID NO: 2309 - RNA, 23 nt, artificial
  Oligomer
cacuguucaugaauacacuugau

SEQ ID NO: 2310 - RNA, 23 nt, artificial
  Oligomer
ucacuguucaugaauacacuuga

SEQ ID NO: 2311 - RNA, 23 nt, artificial
  Oligomer
cucacuguucaugaauacacuug

SEQ ID NO: 2312 - RNA, 23 nt, artificial
  Oligomer
acucacuguucaugaauacacuu

SEQ ID NO: 2313 - RNA, 23 nt, artificial
  Oligomer
cagacgcaugaauguaagaguag

SEQ ID NO: 2314 - RNA, 23 nt, artificial
  Oligomer
acagacgcaugaauguaagagua

SEQ ID NO: 2315 - RNA, 23 nt, artificial
  Oligomer
uacagacgcaugaauguaagagu

SEQ ID NO: 2316 - RNA, 23 nt, artificial
  Oligomer
uuacagacgcaugaauguaagag

SEQ ID NO: 2317 - RNA, 23 nt, artificial
  Oligomer
ggugguuuguguaucuuacuggu

SEQ ID NO: 2318 - RNA, 23 nt, artificial
  Oligomer
aggugguuuguguaucuuacugg

SEQ ID NO: 2319 - RNA, 23 nt, artificial
  Oligomer
gaggugguuuguguaucuuacug

SEQ ID NO: 2320 - RNA, 23 nt, artificial
  Oligomer
ggaggugguuuguguaucuuacu

SEQ ID NO: 2321 - RNA, 23 nt, artificial
  Oligomer
uggaggugguuuguguaucuuac

SEQ ID NO: 2322 - RNA, 23 nt, artificial
  Oligomer
cugacaguuaacaguggugugac

SEQ ID NO: 2323 - RNA, 23 nt, artificial
  Oligomer
guguguguagcauguaccuuauu

SEQ ID NO: 2324 - RNA, 23 nt, artificial
  Oligomer
uguguguguagcauguaccuuau

SEQ ID NO: 2325 - RNA, 23 nt, artificial
  Oligomer
acaaggcuuccagcuggaugugu

SEQ ID NO: 2326 - RNA, 23 nt, artificial
  Oligomer
aacaaggcuuccagcuggaugug

SEQ ID NO: 2327 - RNA, 23 nt, artificial
  Oligomer
caacaaggcuuccagcuggaugu

SEQ ID NO: 2328 - RNA, 23 nt, artificial
  Oligomer
ccaacaaggcuuccagcuggaug

SEQ ID NO: 2329 - RNA, 23 nt, artificial
  Oligomer
gccaacaaggcuuccagcuggau

SEQ ID NO: 2330 - RNA, 23 nt, artificial
  Oligomer
caugaaacaaaggcuuaggggcc

SEQ ID NO: 2331 - RNA, 23 nt, artificial
  Oligomer
cugagggacugauuccugugguu

SEQ ID NO: 2332 - RNA, 23 nt, artificial
  Oligomer
gcugagggacugauuccuguggu

SEQ ID NO: 2333 - RNA, 23 nt, artificial
  Oligomer
agcugagggacugauuccugugg

SEQ ID NO: 2334 - RNA, 23 nt, artificial
  Oligomer
gagcugagggacugauuccugug

SEQ ID NO: 2335 - RNA, 23 nt, artificial
  Oligomer
ggagcugagggacugauuccugu

SEQ ID NO: 2336 - RNA, 23 nt, artificial
  Oligomer
cucggaacagcugcucauugagg

SEQ ID NO: 2337 - RNA, 23 nt, artificial
  Oligomer
gcucggaacagcugcucauugag

SEQ ID NO: 2338 - RNA, 23 nt, artificial
  Oligomer
agcucggaacagcugcucauuga

SEQ ID NO: 2339 - RNA, 23 nt, artificial
  Oligomer
cagcucggaacagcugcucauug

SEQ ID NO: 2340 - RNA, 23 nt, artificial
  Oligomer
acagcucggaacagcugcucauu

SEQ ID NO: 2341 - RNA, 23 nt, artificial
  Oligomer
caaagaacuacugcgccuggccu

SEQ ID NO: 2342 - RNA, 23 nt, artificial
  Oligomer
gcaaagaacuacugcgccuggcc

SEQ ID NO: 2343 - RNA, 23 nt, artificial
  Oligomer
ggcaaagaacuacugcgccuggc

SEQ ID NO: 2344 - RNA, 23 nt, artificial
  Oligomer
gggcaaagaacuacugcgccugg

SEQ ID NO: 2345 - RNA, 23 nt, artificial
  Oligomer
ugggcaaagaacuacugcgccug

SEQ ID NO: 2346 - RNA, 23 nt, artificial
  Oligomer
gugacccugaggaugaacacuug

SEQ ID NO: 2347 - RNA, 23 nt, artificial
  Oligomer
uaagauacucacuguucaugaau

SEQ ID NO: 2348 - RNA, 23 nt, artificial
  Oligomer
uuguaucuuguuuuucugaucgg

SEQ ID NO: 2349 - RNA, 23 nt, artificial
  Oligomer
uuuguaucuuguuuuucugaucg

SEQ ID NO: 2350 - RNA, 23 nt, artificial
  Oligomer
uuuuguaucuuguuuuucugauc

SEQ ID NO: 2351 - RNA, 23 nt, artificial
  Oligomer
gugguuuguguaucuuacugguc

SEQ ID NO: 2352 - RNA, 23 nt, artificial
  Oligomer
ggcuuccagcuggaugugugugu

SEQ ID NO: 2353 - RNA, 23 nt, artificial
  Oligomer
aggcuuccagcuggaugugugug

SEQ ID NO: 2354 - RNA, 23 nt, artificial
  Oligomer
aaggcuuccagcuggaugugugu

SEQ ID NO: 2355 - RNA, 23 nt, artificial
  Oligomer
caguacuguagcaugaaacaaag

SEQ ID NO: 2356 - RNA, 23 nt, artificial
  Oligomer
ucaguacuguagcaugaaacaaa

SEQ ID NO: 2357 - RNA, 23 nt, artificial
  Oligomer
cucaguacuguagcaugaaacaa

SEQ ID NO: 2358 - RNA, 23 nt, artificial
  Oligomer
ccucaguacuguagcaugaaaca

SEQ ID NO: 2359 - RNA, 23 nt, artificial
  Oligomer
cccucaguacuguagcaugaaac

SEQ ID NO: 2360 - RNA, 23 nt, artificial
  Oligomer
cuugucuuagcaguucucgcuga

SEQ ID NO: 2361 - RNA, 23 nt, artificial
  Oligomer
augccuagccaguugguaagcca

SEQ ID NO: 2362 - RNA, 23 nt, artificial
  Oligomer
aagauacucacuguucaugaaua

SEQ ID NO: 2363 - RNA, 23 nt, artificial
  Oligomer
gggucuuccaucuagaacuguuu

SEQ ID NO: 2364 - RNA, 23 nt, artificial
  Oligomer
ugggucuuccaucuagaacuguu

SEQ ID NO: 2365 - RNA, 23 nt, artificial
  Oligomer
ucugggucuuccaucuagaacug

SEQ ID NO: 2366 - RNA, 23 nt, artificial
  Oligomer
aucugggucuuccaucuagaacu

SEQ ID NO: 2367 - RNA, 23 nt, artificial
  Oligomer
caucugggucuuccaucuagaac

SEQ ID NO: 2368 - RNA, 23 nt, artificial
  Oligomer
guggaggugguuuguguaucuua

SEQ ID NO: 2369 - RNA, 23 nt, artificial
  Oligomer
aagcucauugaguugugugcggg

SEQ ID NO: 2370 - RNA, 23 nt, artificial
  Oligomer
cgcuccggcacucugaguucauc

SEQ ID NO: 2371 - RNA, 23 nt, artificial
  Oligomer
acgcuccggcacucugaguucau

SEQ ID NO: 2372 - RNA, 23 nt, artificial
  Oligomer
uucgcacacccauucaagcggca

SEQ ID NO: 2373 - RNA, 23 nt, artificial
  Oligomer
guucgcacacccauucaagcggc

SEQ ID NO: 2374 - RNA, 23 nt, artificial
  Oligomer
gguucgcacacccauucaagcgg

SEQ ID NO: 2375 - RNA, 23 nt, artificial
  Oligomer
ggguucgcacacccauucaagcg

SEQ ID NO: 2376 - RNA, 23 nt, artificial
  Oligomer
cggguucgcacacccauucaagc

SEQ ID NO: 2377 - RNA, 23 nt, artificial
  Oligomer
gacagagacgacugaacuuuugg

SEQ ID NO: 2378 - RNA, 23 nt, artificial
  Oligomer
agacagagacgacugaacuuuug

SEQ ID NO: 2379 - RNA, 23 nt, artificial
  Oligomer
cugcucauugaggaguguugaac

SEQ ID NO: 2380 - RNA, 23 nt, artificial
  Oligomer
gcugcucauugaggaguguugaa

SEQ ID NO: 2381 - RNA, 23 nt, artificial
  Oligomer
agcugcucauugaggaguguuga

SEQ ID NO: 2382 - RNA, 23 nt, artificial
  Oligomer
cagcugcucauugaggaguguug

SEQ ID NO: 2383 - RNA, 23 nt, artificial
  Oligomer
ucaagaagaagcuguacagcucg

SEQ ID NO: 2384 - RNA, 23 nt, artificial
  Oligomer
aucaagaagaagcuguacagcuc

SEQ ID NO: 2385 - RNA, 23 nt, artificial
  Oligomer
uuccgagucaucaagaagaagcu

SEQ ID NO: 2386 - RNA, 23 nt, artificial
  Oligomer
cuuccgagucaucaagaagaagc

SEQ ID NO: 2387 - RNA, 23 nt, artificial
  Oligomer
gcuuccgagucaucaagaagaag

SEQ ID NO: 2388 - RNA, 23 nt, artificial
  Oligomer
ggcuuccgagucaucaagaagaa

SEQ ID NO: 2389 - RNA, 23 nt, artificial
  Oligomer
uggcuuccgagucaucaagaaga

SEQ ID NO: 2390 - RNA, 23 nt, artificial
  Oligomer
ccaggugggcaaagaacuacugc

SEQ ID NO: 2391 - RNA, 23 nt, artificial
  Oligomer
gccaggugggcaaagaacuacug

SEQ ID NO: 2392 - RNA, 23 nt, artificial
  Oligomer
agccaggugggcaaagaacuacu

SEQ ID NO: 2393 - RNA, 23 nt, artificial
  Oligomer
aagccaggugggcaaagaacuac

SEQ ID NO: 2394 - RNA, 23 nt, artificial
  Oligomer
uaagccaggugggcaaagaacua

SEQ ID NO: 2395 - RNA, 23 nt, artificial
  Oligomer
uacucacuguucaugaauacacu

SEQ ID NO: 2396 - RNA, 23 nt, artificial
  Oligomer
ucuagaacuguuuacaugaagau

SEQ ID NO: 2397 - RNA, 23 nt, artificial
  Oligomer
aucuagaacuguuuacaugaaga

SEQ ID NO: 2398 - RNA, 23 nt, artificial
  Oligomer
cugggucuuccaucuagaacugu

SEQ ID NO: 2399 - RNA, 23 nt, artificial
  Oligomer
ugaaaaauuacaccuggcagcug

SEQ ID NO: 2400 - RNA, 23 nt, artificial
  Oligomer
uugaaaaauuacaccuggcagcu

SEQ ID NO: 2401 - RNA, 23 nt, artificial
  Oligomer
cuugaaaaauuacaccuggcagc

SEQ ID NO: 2402 - RNA, 23 nt, artificial
  Oligomer
acuugaaaaauuacaccuggcag

SEQ ID NO: 2403 - RNA, 23 nt, artificial
  Oligomer
cacuugaaaaauuacaccuggca

SEQ ID NO: 2404 - RNA, 23 nt, artificial
  Oligomer
agacacggcuuaccuggaugggg

SEQ ID NO: 2405 - RNA, 23 nt, artificial
  Oligomer
aagacacggcuuaccuggauggg

SEQ ID NO: 2406 - RNA, 23 nt, artificial
  Oligomer
gaagacacggcuuaccuggaugg

SEQ ID NO: 2407 - RNA, 23 nt, artificial
  Oligomer
ggaagacacggcuuaccuggaug

SEQ ID NO: 2408 - RNA, 23 nt, artificial
  Oligomer
aggaagacacggcuuaccuggau

SEQ ID NO: 2409 - RNA, 23 nt, artificial
  Oligomer
acugacaguuaacagugguguga

SEQ ID NO: 2410 - RNA, 23 nt, artificial
  Oligomer
uacugacaguuaacaguggugug

SEQ ID NO: 2411 - RNA, 23 nt, artificial
  Oligomer
gcuggauguguguguagcaugua

SEQ ID NO: 2412 - RNA, 23 nt, artificial
  Oligomer
agcuggauguguguguagcaugu

SEQ ID NO: 2413 - RNA, 23 nt, artificial
  Oligomer
cagcuggauguguguguagcaug

SEQ ID NO: 2414 - RNA, 23 nt, artificial
  Oligomer
uugaacuucaaccugagggggcc

SEQ ID NO: 2415 - RNA, 23 nt, artificial
  Oligomer
guugaacuucaaccugagggggc

SEQ ID NO: 2416 - RNA, 23 nt, artificial
  Oligomer
uguugaacuucaaccugaggggg

SEQ ID NO: 2417 - RNA, 23 nt, artificial
  Oligomer
guguugaacuucaaccugagggg

SEQ ID NO: 2418 - RNA, 23 nt, artificial
  Oligomer
aguguugaacuucaaccugaggg

SEQ ID NO: 2419 - RNA, 23 nt, artificial
  Oligomer
acggguucgcacacccauucaag

SEQ ID NO: 2420 - RNA, 23 nt, artificial
  Oligomer
guauuaagaccuaugcaauauuu

SEQ ID NO: 2421 - RNA, 23 nt, artificial
  Oligomer
aguauuaagaccuaugcaauauu

SEQ ID NO: 2422 - RNA, 23 nt, artificial
  Oligomer
aaguauuaagaccuaugcaauau

SEQ ID NO: 2423 - RNA, 23 nt, artificial
  Oligomer
caaguauuaagaccuaugcaaua

SEQ ID NO: 2424 - RNA, 23 nt, artificial
  Oligomer
ucaaguauuaagaccuaugcaau

SEQ ID NO: 2425 - RNA, 23 nt, artificial
  Oligomer
ugaagauaagauacucacuguuc

SEQ ID NO: 2426 - RNA, 23 nt, artificial
  Oligomer
augaagauaagauacucacuguu

SEQ ID NO: 2427 - RNA, 23 nt, artificial
  Oligomer
gaaaaauuacaccuggcagcugc

SEQ ID NO: 2428 - RNA, 23 nt, artificial
  Oligomer
gaucuuugacacuugaaaaauua

SEQ ID NO: 2429 - RNA, 23 nt, artificial
  Oligomer
gcuaucuuacagacgcaugaaug

SEQ ID NO: 2430 - RNA, 23 nt, artificial
  Oligomer
ucuguccucaccaugccuagccu

SEQ ID NO: 2431 - RNA, 23 nt, artificial
  Oligomer
gucuguccucaccaugccuagcc

SEQ ID NO: 2432 - RNA, 23 nt, artificial
  Oligomer
cgucuguccucaccaugccuagc

SEQ ID NO: 2433 - RNA, 23 nt, artificial
  Oligomer
gcgucuguccucaccaugccuag

SEQ ID NO: 2434 - RNA, 23 nt, artificial
  Oligomer
ggcgucuguccucaccaugccua

SEQ ID NO: 2435 - RNA, 23 nt, artificial
  Oligomer
augaaacaaaggcuuaggggcca

SEQ ID NO: 2436 - RNA, 23 nt, artificial
  Oligomer
ccccaucguguacugcagaguug

SEQ ID NO: 2437 - RNA, 23 nt, artificial
  Oligomer
cccccaucguguacugcagaguu

SEQ ID NO: 2438 - RNA, 23 nt, artificial
  Oligomer
acacuugaaaaauuacaccuggc

SEQ ID NO: 2439 - RNA, 23 nt, artificial
  Oligomer
acuugggaucuuugacacuugaa

SEQ ID NO: 2440 - RNA, 23 nt, artificial
  Oligomer
cacuugggaucuuugacacuuga

SEQ ID NO: 2441 - RNA, 23 nt, artificial
  Oligomer
ucacuugggaucuuugacacuug

SEQ ID NO: 2442 - RNA, 23 nt, artificial
  Oligomer
caucacuacugaccuguuguagg

SEQ ID NO: 2443 - RNA, 23 nt, artificial
  Oligomer
gcaucacuacugaccuguuguag

SEQ ID NO: 2444 - RNA, 23 nt, artificial
  Oligomer
agcaucacuacugaccuguugua

SEQ ID NO: 2445 - RNA, 23 nt, artificial
  Oligomer
gagcaucacuacugaccuguugu

SEQ ID NO: 2446 - RNA, 23 nt, artificial
  Oligomer
ggagcaucacuacugaccuguug

SEQ ID NO: 2447 - RNA, 23 nt, artificial
  Oligomer
caguggugugacauccagagagc

SEQ ID NO: 2448 - RNA, 23 nt, artificial
  Oligomer
acaguggugugacauccagagag

SEQ ID NO: 2449 - RNA, 23 nt, artificial
  Oligomer
aacaguggugugacauccagaga

SEQ ID NO: 2450 - RNA, 23 nt, artificial
  Oligomer
uaacaguggugugacauccagag

SEQ ID NO: 2451 - RNA, 23 nt, artificial
  Oligomer
uuacugacaguuaacaguggugu

SEQ ID NO: 2452 - RNA, 23 nt, artificial
  Oligomer
uuguuacugacaguuaacagugg

SEQ ID NO: 2453 - RNA, 23 nt, artificial
  Oligomer
uuuguuacugacaguuaacagug

SEQ ID NO: 2454 - RNA, 23 nt, artificial
  Oligomer
uuuuguuacugacaguuaacagu

SEQ ID NO: 2455 - RNA, 23 nt, artificial
  Oligomer
uuuuuguuacugacaguuaacag

SEQ ID NO: 2456 - RNA, 23 nt, artificial
  Oligomer
auuuuuguuacugacaguuaaca

SEQ ID NO: 2457 - RNA, 23 nt, artificial
  Oligomer
cuguuuagcuccgccaacucucc

SEQ ID NO: 2458 - RNA, 23 nt, artificial
  Oligomer
gcuguuuagcuccgccaacucuc

SEQ ID NO: 2459 - RNA, 23 nt, artificial
  Oligomer
ggcuguuuagcuccgccaacucu

SEQ ID NO: 2460 - RNA, 23 nt, artificial
  Oligomer
gggcuguuuagcuccgccaacuc

SEQ ID NO: 2461 - RNA, 23 nt, artificial
  Oligomer
ggggcuguuuagcuccgccaacu

SEQ ID NO: 2462 - RNA, 23 nt, artificial
  Oligomer
cugcugaugccuagccaguuggu

SEQ ID NO: 2463 - RNA, 23 nt, artificial
  Oligomer
ccugcugaugccuagccaguugg

SEQ ID NO: 2464 - RNA, 23 nt, artificial
  Oligomer
gccugcugaugccuagccaguug

SEQ ID NO: 2465 - RNA, 23 nt, artificial
  Oligomer
cgccugcugaugccuagccaguu

SEQ ID NO: 2466 - RNA, 23 nt, artificial
  Oligomer
caugaagauaagauacucacugu

SEQ ID NO: 2467 - RNA, 23 nt, artificial
  Oligomer
agaacuguuuacaugaagauaag

SEQ ID NO: 2468 - RNA, 23 nt, artificial
  Oligomer
uagaacuguuuacaugaagauaa

SEQ ID NO: 2469 - RNA, 23 nt, artificial
  Oligomer
cuagaacuguuuacaugaagaua

SEQ ID NO: 2470 - RNA, 23 nt, artificial
  Oligomer
cagugacccugaggaugaacacu

SEQ ID NO: 2471 - RNA, 23 nt, artificial
  Oligomer
ucagugacccugaggaugaacac

SEQ ID NO: 2472 - RNA, 23 nt, artificial
  Oligomer
cucagugacccugaggaugaaca

SEQ ID NO: 2473 - RNA, 23 nt, artificial
  Oligomer
gcucagugacccugaggaugaac

SEQ ID NO: 2474 - RNA, 23 nt, artificial
  Oligomer
ugcucagugacccugaggaugaa

SEQ ID NO: 2475 - RNA, 23 nt, artificial
  Oligomer
gacacuugaaaaauuacaccugg

SEQ ID NO: 2476 - RNA, 23 nt, artificial
  Oligomer
ugacacuugaaaaauuacaccug

SEQ ID NO: 2477 - RNA, 23 nt, artificial
  Oligomer
uugacacuugaaaaauuacaccu

SEQ ID NO: 2478 - RNA, 23 nt, artificial
  Oligomer
uuugacacuugaaaaauuacacc

SEQ ID NO: 2479 - RNA, 23 nt, artificial
  Oligomer
cuuugacacuugaaaaauuacac

SEQ ID NO: 2480 - RNA, 23 nt, artificial
  Oligomer
ugggugucagggaucacuuggga

SEQ ID NO: 2481 - RNA, 23 nt, artificial
  Oligomer
gaauguaagaguaggaaggggug

SEQ ID NO: 2482 - RNA, 23 nt, artificial
  Oligomer
ugaauguaagaguaggaaggggu

SEQ ID NO: 2483 - RNA, 23 nt, artificial
  Oligomer
augaauguaagaguaggaagggg

SEQ ID NO: 2484 - RNA, 23 nt, artificial
  Oligomer
ucacuacugaccuguuguaggca

SEQ ID NO: 2485 - RNA, 23 nt, artificial
  Oligomer
aucacuacugaccuguuguaggc

SEQ ID NO: 2486 - RNA, 23 nt, artificial
  Oligomer
uaucuuacuggucugaagggacc

SEQ ID NO: 2487 - RNA, 23 nt, artificial
  Oligomer
guuaacaguggugugacauccag

SEQ ID NO: 2488 - RNA, 23 nt, artificial
  Oligomer
auugaguugugugcggguggcug

SEQ ID NO: 2489 - RNA, 23 nt, artificial
  Oligomer
aauaguguuucccaggaagcuca

SEQ ID NO: 2490 - RNA, 23 nt, artificial
  Oligomer
gaauaguguuucccaggaagcuc

SEQ ID NO: 2491 - RNA, 23 nt, artificial
  Oligomer
ggaauaguguuucccaggaagcu

SEQ ID NO: 2492 - RNA, 23 nt, artificial
  Oligomer
gggaauaguguuucccaggaagc

SEQ ID NO: 2493 - RNA, 23 nt, artificial
  Oligomer
ggggaauaguguuucccaggaag

SEQ ID NO: 2494 - RNA, 23 nt, artificial
  Oligomer
cuuagcaguucucgcugaccgcg

SEQ ID NO: 2495 - RNA, 23 nt, artificial
  Oligomer
ucuuagcaguucucgcugaccgc

SEQ ID NO: 2496 - RNA, 23 nt, artificial
  Oligomer
gucuuagcaguucucgcugaccg

SEQ ID NO: 2497 - RNA, 23 nt, artificial
  Oligomer
ugucuuagcaguucucgcugacc

SEQ ID NO: 2498 - RNA, 23 nt, artificial
  Oligomer
uugucuuagcaguucucgcugac

SEQ ID NO: 2499 - RNA, 23 nt, artificial
  Oligomer
gaguguugaacuucaaccugagg

SEQ ID NO: 2500 - RNA, 23 nt, artificial
  Oligomer
ggaguguugaacuucaaccugag

SEQ ID NO: 2501 - RNA, 23 nt, artificial
  Oligomer
auacucacuguucaugaauacac

SEQ ID NO: 2502 - RNA, 23 nt, artificial
  Oligomer
gauacucacuguucaugaauaca

SEQ ID NO: 2503 - RNA, 23 nt, artificial
  Oligomer
agauacucacuguucaugaauac

SEQ ID NO: 2504 - RNA, 23 nt, artificial
  Oligomer
cggagcaucacuacugaccuguu

SEQ ID NO: 2505 - RNA, 23 nt, artificial
  Oligomer
uguuuuucugaucggagcaucac

SEQ ID NO: 2506 - RNA, 23 nt, artificial
  Oligomer
auaguguuucccaggaagcucau

SEQ ID NO: 2507 - RNA, 23 nt, artificial
  Oligomer
ugaggaguguugaacuucaaccu

SEQ ID NO: 2508 - RNA, 23 nt, artificial
  Oligomer
uugaggaguguugaacuucaacc

SEQ ID NO: 2509 - RNA, 23 nt, artificial
  Oligomer
auugaggaguguugaacuucaac

SEQ ID NO: 2510 - RNA, 23 nt, artificial
  Oligomer
acagcugcucauugaggaguguu

SEQ ID NO: 2511 - RNA, 23 nt, artificial
  Oligomer
gacgcacuugucuuagcaguucu

SEQ ID NO: 2512 - RNA, 23 nt, artificial
  Oligomer
ggacgcacuugucuuagcaguuc

SEQ ID NO: 2513 - RNA, 23 nt, artificial
  Oligomer
aggacgcacuugucuuagcaguu

SEQ ID NO: 2514 - RNA, 23 nt, artificial
  Oligomer
caggacgcacuugucuuagcagu

SEQ ID NO: 2515 - RNA, 23 nt, artificial
  Oligomer
aaaaauuacaccuggcagcugcg

SEQ ID NO: 2516 - RNA, 23 nt, artificial
  Oligomer
aucggagcaucacuacugaccug

SEQ ID NO: 2517 - RNA, 23 nt, artificial
  Oligomer
gaucggagcaucacuacugaccu

SEQ ID NO: 2518 - RNA, 23 nt, artificial
  Oligomer
ugaucggagcaucacuacugacc

SEQ ID NO: 2519 - RNA, 23 nt, artificial
  Oligomer
cugaucggagcaucacuacugac

SEQ ID NO: 2520 - RNA, 23 nt, artificial
  Oligomer
ucugaucggagcaucacuacuga

SEQ ID NO: 2521 - RNA, 23 nt, artificial
  Oligomer
uuaacaguggugugacauccaga

SEQ ID NO: 2522 - RNA, 23 nt, artificial
  Oligomer
ccccucaguacuguagcaugaaa

SEQ ID NO: 2523 - RNA, 23 nt, artificial
  Oligomer
aacugaggcagccaccuaaggug

SEQ ID NO: 2524 - RNA, 23 nt, artificial
  Oligomer
aaacugaggcagccaccuaaggu

SEQ ID NO: 2525 - RNA, 23 nt, artificial
  Oligomer
aaaacugaggcagccaccuaagg

SEQ ID NO: 2526 - RNA, 23 nt, artificial
  Oligomer
gaaaacugaggcagccaccuaag

SEQ ID NO: 2527 - RNA, 23 nt, artificial
  Oligomer
ggaaaacugaggcagccaccuaa

SEQ ID NO: 2528 - RNA, 23 nt, artificial
  Oligomer
gauuccugugguuggaaaacuga

SEQ ID NO: 2529 - RNA, 23 nt, artificial
  Oligomer
ugauuccugugguuggaaaacug

SEQ ID NO: 2530 - RNA, 23 nt, artificial
  Oligomer
cugauuccugugguuggaaaacu

SEQ ID NO: 2531 - RNA, 23 nt, artificial
  Oligomer
acugauuccugugguuggaaaac

SEQ ID NO: 2532 - RNA, 23 nt, artificial
  Oligomer
aagacagagacgacugaacuuuu

SEQ ID NO: 2533 - RNA, 23 nt, artificial
  Oligomer
caagacagagacgacugaacuuu

SEQ ID NO: 2534 - RNA, 23 nt, artificial
  Oligomer
ccaagacagagacgacugaacuu

SEQ ID NO: 2535 - RNA, 23 nt, artificial
  Oligomer
gaggaguguugaacuucaaccug

SEQ ID NO: 2536 - RNA, 23 nt, artificial
  Oligomer
gaacuguuuacaugaagauaaga

SEQ ID NO: 2537 - RNA, 23 nt, artificial
  Oligomer
ucccccaucguguacugcagagu

SEQ ID NO: 2538 - RNA, 23 nt, artificial
  Oligomer
agcuaucuuacagacgcaugaau

SEQ ID NO: 2539 - RNA, 23 nt, artificial
  Oligomer
cagcuaucuuacagacgcaugaa

SEQ ID NO: 2540 - RNA, 23 nt, artificial
  Oligomer
gcagcuaucuuacagacgcauga

SEQ ID NO: 2541 - RNA, 23 nt, artificial
  Oligomer
guucaucagcaaacgcccuggcg

SEQ ID NO: 2542 - RNA, 23 nt, artificial
  Oligomer
aguucaucagcaaacgcccuggc

SEQ ID NO: 2543 - RNA, 23 nt, artificial
  Oligomer
gaguucaucagcaaacgcccugg

SEQ ID NO: 2544 - RNA, 23 nt, artificial
  Oligomer
ugaguucaucagcaaacgcccug

SEQ ID NO: 2545 - RNA, 23 nt, artificial
  Oligomer
cugaguucaucagcaaacgcccu

SEQ ID NO: 2546 - RNA, 23 nt, artificial
  Oligomer
aucuuacuggucugaagggacca

SEQ ID NO: 2547 - RNA, 23 nt, artificial
  Oligomer
cuguagcaugaaacaaaggcuua

SEQ ID NO: 2548 - RNA, 23 nt, artificial
  Oligomer
acuguagcaugaaacaaaggcuu

SEQ ID NO: 2549 - RNA, 23 nt, artificial
  Oligomer
uacuguagcaugaaacaaaggcu

SEQ ID NO: 2550 - RNA, 23 nt, artificial
  Oligomer
guacuguagcaugaaacaaaggc

SEQ ID NO: 2551 - RNA, 23 nt, artificial
  Oligomer
aguacuguagcaugaaacaaagg

SEQ ID NO: 2552 - RNA, 23 nt, artificial
  Oligomer
uugugugccaaccugaugcagcu

SEQ ID NO: 2553 - RNA, 23 nt, artificial
  Oligomer
cuugugugccaaccugaugcagc

SEQ ID NO: 2554 - RNA, 23 nt, artificial
  Oligomer
uggucugaagggaccaagugugu

SEQ ID NO: 2555 - RNA, 23 nt, artificial
  Oligomer
ucuuacuggucugaagggaccaa

SEQ ID NO: 2556 - RNA, 23 nt, artificial
  Oligomer
uuagcaguucucgcugaccgcgc

SEQ ID NO: 2557 - RNA, 23 nt, artificial
  Oligomer
uccaagacagagacgacugaacu

SEQ ID NO: 2558 - RNA, 23 nt, artificial
  Oligomer
cuccaagacagagacgacugaac

SEQ ID NO: 2559 - RNA, 23 nt, artificial
  Oligomer
cagggaucacuugggaucuuuga

SEQ ID NO: 2560 - RNA, 23 nt, artificial
  Oligomer
ucagggaucacuugggaucuuug

SEQ ID NO: 2561 - RNA, 23 nt, artificial
  Oligomer
ugacauccagagagcagcugggc

SEQ ID NO: 2562 - RNA, 23 nt, artificial
  Oligomer
gugacauccagagagcagcuggg

SEQ ID NO: 2563 - RNA, 23 nt, artificial
  Oligomer
ugugacauccagagagcagcugg

SEQ ID NO: 2564 - RNA, 23 nt, artificial
  Oligomer
ccuccaagacagagacgacugaa

SEQ ID NO: 2565 - RNA, 23 nt, artificial
  Oligomer
cccuccaagacagagacgacuga

SEQ ID NO: 2566 - RNA, 23 nt, artificial
  Oligomer
ugcccuccaagacagagacgacu

SEQ ID NO: 2567 - RNA, 23 nt, artificial
  Oligomer
agaagcuguacagcucggaacag

SEQ ID NO: 2568 - RNA, 23 nt, artificial
  Oligomer
aagaagcuguacagcucggaaca

SEQ ID NO: 2569 - RNA, 23 nt, artificial
  Oligomer
gaagaagcuguacagcucggaac

SEQ ID NO: 2570 - RNA, 23 nt, artificial
  Oligomer
agaagaagcuguacagcucggaa

SEQ ID NO: 2571 - RNA, 23 nt, artificial
  Oligomer
aagaagaagcuguacagcucgga

SEQ ID NO: 2572 - RNA, 23 nt, artificial
  Oligomer
cgagucaucaagaagaagcugua

SEQ ID NO: 2573 - RNA, 23 nt, artificial
  Oligomer
aauacacuugauguucaaguauu

SEQ ID NO: 2574 - RNA, 23 nt, artificial
  Oligomer
cuguuuacaugaagauaagauac

SEQ ID NO: 2575 - RNA, 23 nt, artificial
  Oligomer
acuguuuacaugaagauaagaua

SEQ ID NO: 2576 - RNA, 23 nt, artificial
  Oligomer
aacuguuuacaugaagauaagau

SEQ ID NO: 2577 - RNA, 23 nt, artificial
  Oligomer
guguacugcagaguugagcuggc

SEQ ID NO: 2578 - RNA, 23 nt, artificial
  Oligomer
uguccucaccaugccuagccuuu

SEQ ID NO: 2579 - RNA, 23 nt, artificial
  Oligomer
cugaccuguuguaggcagcuauc

SEQ ID NO: 2580 - RNA, 23 nt, artificial
  Oligomer
acugaccuguuguaggcagcuau

SEQ ID NO: 2581 - RNA, 23 nt, artificial
  Oligomer
uacugaccuguuguaggcagcua

SEQ ID NO: 2582 - RNA, 23 nt, artificial
  Oligomer
cuacugaccuguuguaggcagcu

SEQ ID NO: 2583 - RNA, 23 nt, artificial
  Oligomer
ucggagcaucacuacugaccugu

SEQ ID NO: 2584 - RNA, 23 nt, artificial
  Oligomer
gggggaauaguguuucccaggaa

SEQ ID NO: 2585 - RNA, 23 nt, artificial
  Oligomer
ugggggaauaguguuucccagga

SEQ ID NO: 2586 - RNA, 23 nt, artificial
  Oligomer
uuggaaaacugaggcagccaccu

SEQ ID NO: 2587 - RNA, 23 nt, artificial
  Oligomer
guuggaaaacugaggcagccacc

SEQ ID NO: 2588 - RNA, 23 nt, artificial
  Oligomer
gguuggaaaacugaggcagccac

SEQ ID NO: 2589 - RNA, 23 nt, artificial
  Oligomer
ugguuggaaaacugaggcagcca

SEQ ID NO: 2590 - RNA, 23 nt, artificial
  Oligomer
gugguuggaaaacugaggcagcc

SEQ ID NO: 2591 - RNA, 23 nt, artificial
  Oligomer
ugugguuggaaaacugaggcagc

SEQ ID NO: 2592 - RNA, 23 nt, artificial
  Oligomer
ugagggacugauuccugugguug

SEQ ID NO: 2593 - RNA, 23 nt, artificial
  Oligomer
aaagaacuacugcgccuggccua

SEQ ID NO: 2594 - RNA, 23 nt, artificial
  Oligomer
ugaacacuugugugccaaccuga

SEQ ID NO: 2595 - RNA, 23 nt, artificial
  Oligomer
augaacacuugugugccaaccug

SEQ ID NO: 2596 - RNA, 23 nt, artificial
  Oligomer
gaugaacacuugugugccaaccu

SEQ ID NO: 2597 - RNA, 23 nt, artificial
  Oligomer
ggaugaacacuugugugccaacc

SEQ ID NO: 2598 - RNA, 23 nt, artificial
  Oligomer
aggaugaacacuugugugccaac

SEQ ID NO: 2599 - RNA, 23 nt, artificial
  Oligomer
uucaaguauuaagaccuaugcaa

SEQ ID NO: 2600 - RNA, 23 nt, artificial
  Oligomer
uguucaaguauuaagaccuaugc

SEQ ID NO: 2601 - RNA, 23 nt, artificial
  Oligomer
auguucaaguauuaagaccuaug

SEQ ID NO: 2602 - RNA, 23 nt, artificial
  Oligomer
gauguucaaguauuaagaccuau

SEQ ID NO: 2603 - RNA, 23 nt, artificial
  Oligomer
ugauguucaaguauuaagaccua

SEQ ID NO: 2604 - RNA, 23 nt, artificial
  Oligomer
uugauguucaaguauuaagaccu

SEQ ID NO: 2605 - RNA, 23 nt, artificial
  Oligomer
cuugauguucaaguauuaagacc

SEQ ID NO: 2606 - RNA, 23 nt, artificial
  Oligomer
acuugauguucaaguauuaagac

SEQ ID NO: 2607 - RNA, 23 nt, artificial
  Oligomer
agugacccugaggaugaacacuu

SEQ ID NO: 2608 - RNA, 23 nt, artificial
  Oligomer
uguuuagcuccgccaacucuccc

SEQ ID NO: 2609 - RNA, 23 nt, artificial
  Oligomer
gaggaugaacacuugugugccaa

SEQ ID NO: 2610 - RNA, 23 nt, artificial
  Oligomer
guucaaguauuaagaccuaugca

SEQ ID NO: 2611 - RNA, 23 nt, artificial
  Oligomer
uaggcagcuaucuuacagacgca

SEQ ID NO: 2612 - RNA, 23 nt, artificial
  Oligomer
cacuacugaccuguuguaggcag

SEQ ID NO: 2613 - RNA, 23 nt, artificial
  Oligomer
uacuggucugaagggaccaagug

SEQ ID NO: 2614 - RNA, 23 nt, artificial
  Oligomer
uuacuggucugaagggaccaagu

SEQ ID NO: 2615 - RNA, 23 nt, artificial
  Oligomer
cuuacuggucugaagggaccaag

SEQ ID NO: 2616 - RNA, 23 nt, artificial
  Oligomer
ccgagucaucaagaagaagcugu

SEQ ID NO: 2617 - RNA, 23 nt, artificial
  Oligomer
uccgagucaucaagaagaagcug

SEQ ID NO: 2618 - RNA, 23 nt, artificial
  Oligomer
ggugggcaaagaacuacugcgcc

SEQ ID NO: 2619 - RNA, 23 nt, artificial
  Oligomer
aggugggcaaagaacuacugcgc

SEQ ID NO: 2620 - RNA, 23 nt, artificial
  Oligomer
caggugggcaaagaacuacugcg

SEQ ID NO: 2621 - RNA, 23 nt, artificial
  Oligomer
agcugcguuuaagccuuccccca

SEQ ID NO: 2622 - RNA, 23 nt, artificial
  Oligomer
cagcugcguuuaagccuuccccc

SEQ ID NO: 2623 - RNA, 23 nt, artificial
  Oligomer
gcagcugcguuuaagccuucccc

SEQ ID NO: 2624 - RNA, 23 nt, artificial
  Oligomer
ggcagcugcguuuaagccuuccc

SEQ ID NO: 2625 - RNA, 23 nt, artificial
  Oligomer
uggcagcugcguuuaagccuucc

SEQ ID NO: 2626 - RNA, 23 nt, artificial
  Oligomer
cuggcagcugcguuuaagccuuc

SEQ ID NO: 2627 - RNA, 23 nt, artificial
  Oligomer
ccuggcagcugcguuuaagccuu

SEQ ID NO: 2628 - RNA, 23 nt, artificial
  Oligomer
acuacugaccuguuguaggcagc

SEQ ID NO: 2629 - RNA, 23 nt, artificial
  Oligomer
guuacugacaguuaacaguggug

SEQ ID NO: 2630 - RNA, 23 nt, artificial
  Oligomer
uguuacugacaguuaacaguggu

SEQ ID NO: 2631 - RNA, 23 nt, artificial
  Oligomer
accccucaguacuguagcaugaa

SEQ ID NO: 2632 - RNA, 23 nt, artificial
  Oligomer
uaccccucaguacuguagcauga

SEQ ID NO: 2633 - RNA, 23 nt, artificial
  Oligomer
aggaguguugaacuucaaccuga

SEQ ID NO: 2634 - RNA, 23 nt, artificial
  Oligomer
acuucgagcugcucagugacccu

SEQ ID NO: 2635 - RNA, 23 nt, artificial
  Oligomer
gacuucgagcugcucagugaccc

SEQ ID NO: 2636 - RNA, 23 nt, artificial
  Oligomer
cgacuucgagcugcucagugacc

SEQ ID NO: 2637 - RNA, 23 nt, artificial
  Oligomer
ccgacuucgagcugcucagugac

SEQ ID NO: 2638 - RNA, 23 nt, artificial
  Oligomer
cccgacuucgagcugcucaguga

SEQ ID NO: 2639 - RNA, 23 nt, artificial
  Oligomer
cuggucugaagggaccaagugug

SEQ ID NO: 2640 - RNA, 23 nt, artificial
  Oligomer
auaccccucaguacuguagcaug

SEQ ID NO: 2641 - RNA, 23 nt, artificial
  Oligomer
acuggcuuccgagucaucaagaa

SEQ ID NO: 2642 - RNA, 23 nt, artificial
  Oligomer
cacuggcuuccgagucaucaaga

SEQ ID NO: 2643 - RNA, 23 nt, artificial
  Oligomer
gcacuggcuuccgagucaucaag

SEQ ID NO: 2644 - RNA, 23 nt, artificial
  Oligomer
agcacuggcuuccgagucaucaa

SEQ ID NO: 2645 - RNA, 23 nt, artificial
  Oligomer
gagcacuggcuuccgagucauca

SEQ ID NO: 2646 - RNA, 23 nt, artificial
  Oligomer
ugccuagccaguugguaagccag

SEQ ID NO: 2647 - RNA, 23 nt, artificial
  Oligomer
auacacuugauguucaaguauua

SEQ ID NO: 2648 - RNA, 23 nt, artificial
  Oligomer
aaauuacaccuggcagcugcguu

SEQ ID NO: 2649 - RNA, 23 nt, artificial
  Oligomer
aaaauuacaccuggcagcugcgu

SEQ ID NO: 2650 - RNA, 23 nt, artificial
  Oligomer
guguuuguuguuuguuuuguauc

SEQ ID NO: 2651 - RNA, 23 nt, artificial
  Oligomer
uguguuuguuguuuguuuuguau

SEQ ID NO: 2652 - RNA, 23 nt, artificial
  Oligomer
aggagcugagggacugauuccug

SEQ ID NO: 2653 - RNA, 23 nt, artificial
  Oligomer
caggagcugagggacugauuccu

SEQ ID NO: 2654 - RNA, 23 nt, artificial
  Oligomer
guaagccaggugggcaaagaacu

SEQ ID NO: 2655 - RNA, 23 nt, artificial
  Oligomer
gguaagccaggugggcaaagaac

SEQ ID NO: 2656 - RNA, 23 nt, artificial
  Oligomer
ugguaagccaggugggcaaagaa

SEQ ID NO: 2657 - RNA, 23 nt, artificial
  Oligomer
gagugccaucugggucuuccauc

SEQ ID NO: 2658 - RNA, 23 nt, artificial
  Oligomer
ggagugccaucugggucuuccau

SEQ ID NO: 2659 - RNA, 23 nt, artificial
  Oligomer
caaggcuuccagcuggaugugug

SEQ ID NO: 2660 - RNA, 23 nt, artificial
  Oligomer
uugguaagccaggugggcaaaga

SEQ ID NO: 2661 - RNA, 23 nt, artificial
  Oligomer
gaggaagacacggcuuaccugga

SEQ ID NO: 2662 - RNA, 23 nt, artificial
  Oligomer
acagcagcaacaguggcuucggg

SEQ ID NO: 2663 - RNA, 23 nt, artificial
  Oligomer
gacagcagcaacaguggcuucgg

SEQ ID NO: 2664 - RNA, 23 nt, artificial
  Oligomer
ggacagcagcaacaguggcuucg

SEQ ID NO: 2665 - RNA, 23 nt, artificial
  Oligomer
uggacagcagcaacaguggcuuc

SEQ ID NO: 2666 - RNA, 23 nt, artificial
  Oligomer
cuggacagcagcaacaguggcuu

SEQ ID NO: 2667 - RNA, 23 nt, artificial
  Oligomer
ggcagcuaucuuacagacgcaug

SEQ ID NO: 2668 - RNA, 23 nt, artificial
  Oligomer
aggcagcuaucuuacagacgcau

SEQ ID NO: 2669 - RNA, 23 nt, artificial
  Oligomer
ggccaacaaggcuuccagcugga

SEQ ID NO: 2670 - RNA, 23 nt, artificial
  Oligomer
aauguaagaguaggaaggggugg

SEQ ID NO: 2671 - RNA, 23 nt, artificial
  Oligomer
acuggucugaagggaccaagugu

SEQ ID NO: 2672 - RNA, 23 nt, artificial
  Oligomer
uauuuuuguuacugacaguuaac

SEQ ID NO: 2673 - RNA, 23 nt, artificial
  Oligomer
cuggcuuccgagucaucaagaag

SEQ ID NO: 2674 - RNA, 23 nt, artificial
  Oligomer
uguacugcagaguugagcuggca

SEQ ID NO: 2675 - RNA, 23 nt, artificial
  Oligomer
ggugggugucagggaucacuugg

SEQ ID NO: 2676 - RNA, 23 nt, artificial
  Oligomer
gggugggugucagggaucacuug

SEQ ID NO: 2677 - RNA, 23 nt, artificial
  Oligomer
ggggugggugucagggaucacuu

SEQ ID NO: 2678 - RNA, 23 nt, artificial
  Oligomer
caagaagaagcuguacagcucgg

SEQ ID NO: 2679 - RNA, 23 nt, artificial
  Oligomer
uuuagcuccgccaacucucccuu

SEQ ID NO: 2680 - RNA, 23 nt, artificial
  Oligomer
guuuagcuccgccaacucucccu

SEQ ID NO: 2681 - RNA, 23 nt, artificial
  Oligomer
gugggcaaagaacuacugcgccu

SEQ ID NO: 2682 - RNA, 23 nt, artificial
  Oligomer
aauuacaccuggcagcugcguuu

SEQ ID NO: 2683 - RNA, 23 nt, artificial
  Oligomer
uggaaaacugaggcagccaccua

SEQ ID NO: 2684 - RNA, 23 nt, artificial
  Oligomer
gcaggagcugagggacugauucc

SEQ ID NO: 2685 - RNA, 23 nt, artificial
  Oligomer
ggcaggagcugagggacugauuc

SEQ ID NO: 2686 - RNA, 23 nt, artificial
  Oligomer
aggcaggagcugagggacugauu

SEQ ID NO: 2687 - RNA, 23 nt, artificial
  Oligomer
cacuugauguucaaguauuaaga

SEQ ID NO: 2688 - RNA, 23 nt, artificial
  Oligomer
acacuugauguucaaguauuaag

SEQ ID NO: 2689 - RNA, 23 nt, artificial
  Oligomer
uacacuugauguucaaguauuaa

SEQ ID NO: 2690 - RNA, 23 nt, artificial
  Oligomer
uacugcagaguugagcuggcagg

SEQ ID NO: 2691 - RNA, 23 nt, artificial
  Oligomer
guacugcagaguugagcuggcag

SEQ ID NO: 2692 - RNA, 23 nt, artificial
  Oligomer
ucugaguucaucagcaaacgccc

SEQ ID NO: 2693 - RNA, 23 nt, artificial
  Oligomer
gaagcuguacagcucggaacagc

SEQ ID NO: 2694 - RNA, 23 nt, artificial
  Oligomer
cacggguucgcacacccauucaa

SEQ ID NO: 2695 - RNA, 23 nt, artificial
  Oligomer
uguacagcucggaacagcugcuc

SEQ ID NO: 2696 - RNA, 23 nt, artificial
  Oligomer
cuguacagcucggaacagcugcu

SEQ ID NO: 2697 - RNA, 23 nt, artificial
  Oligomer
gcuguacagcucggaacagcugc

SEQ ID NO: 2698 - RNA, 23 nt, artificial
  Oligomer
agcuguacagcucggaacagcug

SEQ ID NO: 2699 - RNA, 23 nt, artificial
  Oligomer
aagcuguacagcucggaacagcu

SEQ ID NO: 2700 - RNA, 23 nt, artificial
  Oligomer
cugcucagugacccugaggauga

SEQ ID NO: 2701 - RNA, 23 nt, artificial
  Oligomer
uagccaguugguaagccaggugg

SEQ ID NO: 2702 - RNA, 23 nt, artificial
  Oligomer
cuagccaguugguaagccaggug

SEQ ID NO: 2703 - RNA, 23 nt, artificial
  Oligomer
ccuagccaguugguaagccaggu

SEQ ID NO: 2704 - RNA, 23 nt, artificial
  Oligomer
gccuagccaguugguaagccagg

SEQ ID NO: 2705 - RNA, 23 nt, artificial
  Oligomer
uucaucagcaaacgcccuggcgu

SEQ ID NO: 2706 - RNA, 23 nt, artificial
  Oligomer
ggaggaagacacggcuuaccugg

SEQ ID NO: 2707 - RNA, 23 nt, artificial
  Oligomer
cggaggaagacacggcuuaccug

SEQ ID NO: 2708 - RNA, 23 nt, artificial
  Oligomer
ccggaggaagacacggcuuaccu

SEQ ID NO: 2709 - RNA, 23 nt, artificial
  Oligomer
gugggggaauaguguuucccagg

SEQ ID NO: 2710 - RNA, 23 nt, artificial
  Oligomer
ugugugccaaccugaugcagcug

SEQ ID NO: 2711 - RNA, 23 nt, artificial
  Oligomer
acacaacucaaugagcuuccugg

SEQ ID NO: 2712 - RNA, 23 nt, artificial
  Oligomer
cacaacucaaugagcuuccuggg

SEQ ID NO: 2713 - RNA, 23 nt, artificial
  Oligomer
acaacucaaugagcuuccuggga

SEQ ID NO: 2714 - RNA, 23 nt, artificial
  Oligomer
caacucaaugagcuuccugggaa

SEQ ID NO: 2715 - RNA, 23 nt, artificial
  Oligomer
aacucaaugagcuuccugggaaa

SEQ ID NO: 2716 - RNA, 23 nt, artificial
  Oligomer
uucaugaacagugaguaucuuau

SEQ ID NO: 2717 - RNA, 23 nt, artificial
  Oligomer
ucaugaacagugaguaucuuauc

SEQ ID NO: 2718 - RNA, 23 nt, artificial
  Oligomer
caugaacagugaguaucuuaucu

SEQ ID NO: 2719 - RNA, 23 nt, artificial
  Oligomer
augaacagugaguaucuuaucuu

SEQ ID NO: 2720 - RNA, 23 nt, artificial
  Oligomer
ugaacagugaguaucuuaucuuc

SEQ ID NO: 2721 - RNA, 23 nt, artificial
  Oligomer
gccccuaagccuuuguuucaugc

SEQ ID NO: 2722 - RNA, 23 nt, artificial
  Oligomer
ccccuaagccuuuguuucaugcu

SEQ ID NO: 2723 - RNA, 23 nt, artificial
  Oligomer
cccuaagccuuuguuucaugcua

SEQ ID NO: 2724 - RNA, 23 nt, artificial
  Oligomer
ccuaagccuuuguuucaugcuac

SEQ ID NO: 2725 - RNA, 23 nt, artificial
  Oligomer
cuaagccuuuguuucaugcuaca

SEQ ID NO: 2726 - RNA, 23 nt, artificial
  Oligomer
uugaacaucaaguguauucauga

SEQ ID NO: 2727 - RNA, 23 nt, artificial
  Oligomer
ugaacaucaaguguauucaugaa

SEQ ID NO: 2728 - RNA, 23 nt, artificial
  Oligomer
gaacaucaaguguauucaugaac

SEQ ID NO: 2729 - RNA, 23 nt, artificial
  Oligomer
aacaucaaguguauucaugaaca

SEQ ID NO: 2730 - RNA, 23 nt, artificial
  Oligomer
acaucaaguguauucaugaacag

SEQ ID NO: 2731 - RNA, 23 nt, artificial
  Oligomer
ccuuccuacucuuacauucaugc

SEQ ID NO: 2732 - RNA, 23 nt, artificial
  Oligomer
cuuccuacucuuacauucaugcg

SEQ ID NO: 2733 - RNA, 23 nt, artificial
  Oligomer
uuccuacucuuacauucaugcgu

SEQ ID NO: 2734 - RNA, 23 nt, artificial
  Oligomer
uccuacucuuacauucaugcguc

SEQ ID NO: 2735 - RNA, 23 nt, artificial
  Oligomer
ccuacucuuacauucaugcgucu

SEQ ID NO: 2736 - RNA, 23 nt, artificial
  Oligomer
uacaaaacaaacaacaaacacac

SEQ ID NO: 2737 - RNA, 23 nt, artificial
  Oligomer
acaaaacaaacaacaaacacacu

SEQ ID NO: 2738 - RNA, 23 nt, artificial
  Oligomer
caaaacaaacaacaaacacacuu

SEQ ID NO: 2739 - RNA, 23 nt, artificial
  Oligomer
aaaacaaacaacaaacacacuug

SEQ ID NO: 2740 - RNA, 23 nt, artificial
  Oligomer
aaacaaacaacaaacacacuugg

SEQ ID NO: 2741 - RNA, 23 nt, artificial
  Oligomer
ccaccccaaaaguucagucgucu

SEQ ID NO: 2742 - RNA, 23 nt, artificial
  Oligomer
caccccaaaaguucagucgucuc

SEQ ID NO: 2743 - RNA, 23 nt, artificial
  Oligomer
accccaaaaguucagucgucucu

SEQ ID NO: 2744 - RNA, 23 nt, artificial
  Oligomer
ccccaaaaguucagucgucucug

SEQ ID NO: 2745 - RNA, 23 nt, artificial
  Oligomer
cccaaaaguucagucgucucugu

SEQ ID NO: 2746 - RNA, 23 nt, artificial
  Oligomer
aacaaacaacaaacacacuuggu

SEQ ID NO: 2747 - RNA, 23 nt, artificial
  Oligomer
acaaacaacaaacacacuugguc

SEQ ID NO: 2748 - RNA, 23 nt, artificial
  Oligomer
caaacaacaaacacacuuggucc

SEQ ID NO: 2749 - RNA, 23 nt, artificial
  Oligomer
aaacaacaaacacacuugguccc

SEQ ID NO: 2750 - RNA, 23 nt, artificial
  Oligomer
aagauacacaaaccaccuccacg

SEQ ID NO: 2751 - RNA, 23 nt, artificial
  Oligomer
agauacacaaaccaccuccacga

SEQ ID NO: 2752 - RNA, 23 nt, artificial
  Oligomer
gauacacaaaccaccuccacgac

SEQ ID NO: 2753 - RNA, 23 nt, artificial
  Oligomer
auacacaaaccaccuccacgacc

SEQ ID NO: 2754 - RNA, 23 nt, artificial
  Oligomer
uacacaaaccaccuccacgaccu

SEQ ID NO: 2755 - RNA, 23 nt, artificial
  Oligomer
cagugaguaucuuaucuucaugu

SEQ ID NO: 2756 - RNA, 23 nt, artificial
  Oligomer
agugaguaucuuaucuucaugua

SEQ ID NO: 2757 - RNA, 23 nt, artificial
  Oligomer
gugaguaucuuaucuucauguaa

SEQ ID NO: 2758 - RNA, 23 nt, artificial
  Oligomer
ugaguaucuuaucuucauguaaa

SEQ ID NO: 2759 - RNA, 23 nt, artificial
  Oligomer
gaguaucuuaucuucauguaaac

SEQ ID NO: 2760 - RNA, 23 nt, artificial
  Oligomer
aacaacaaacacacuuggucccu

SEQ ID NO: 2761 - RNA, 23 nt, artificial
  Oligomer
acaacaaacacacuuggucccuu

SEQ ID NO: 2762 - RNA, 23 nt, artificial
  Oligomer
acacaaaccaccuccacgaccuc

SEQ ID NO: 2763 - RNA, 23 nt, artificial
  Oligomer
acacuccucaaugagcagcuguu

SEQ ID NO: 2764 - RNA, 23 nt, artificial
  Oligomer
cacuccucaaugagcagcuguuc

SEQ ID NO: 2765 - RNA, 23 nt, artificial
  Oligomer
acuccucaaugagcagcuguucc

SEQ ID NO: 2766 - RNA, 23 nt, artificial
  Oligomer
cuccucaaugagcagcuguuccg

SEQ ID NO: 2767 - RNA, 23 nt, artificial
  Oligomer
uccucaaugagcagcuguuccga

SEQ ID NO: 2768 - RNA, 23 nt, artificial
  Oligomer
gucccuucagaccaguaagauac

SEQ ID NO: 2769 - RNA, 23 nt, artificial
  Oligomer
ucccuucagaccaguaagauaca

SEQ ID NO: 2770 - RNA, 23 nt, artificial
  Oligomer
cccuucagaccaguaagauacac

SEQ ID NO: 2771 - RNA, 23 nt, artificial
  Oligomer
ccuucagaccaguaagauacaca

SEQ ID NO: 2772 - RNA, 23 nt, artificial
  Oligomer
cuucagaccaguaagauacacaa

SEQ ID NO: 2773 - RNA, 23 nt, artificial
  Oligomer
uucagaccaguaagauacacaaa

SEQ ID NO: 2774 - RNA, 23 nt, artificial
  Oligomer
ucagaccaguaagauacacaaac

SEQ ID NO: 2775 - RNA, 23 nt, artificial
  Oligomer
cagaccaguaagauacacaaacc

SEQ ID NO: 2776 - RNA, 23 nt, artificial
  Oligomer
agaccaguaagauacacaaacca

SEQ ID NO: 2777 - RNA, 23 nt, artificial
  Oligomer
cagcugcucucuggaugucacac

SEQ ID NO: 2778 - RNA, 23 nt, artificial
  Oligomer
agcugcucucuggaugucacacc

SEQ ID NO: 2779 - RNA, 23 nt, artificial
  Oligomer
gcugcucucuggaugucacacca

SEQ ID NO: 2780 - RNA, 23 nt, artificial
  Oligomer
cugcucucuggaugucacaccac

SEQ ID NO: 2781 - RNA, 23 nt, artificial
  Oligomer
ugcucucuggaugucacaccacu

SEQ ID NO: 2782 - RNA, 23 nt, artificial
  Oligomer
ccgcacacaacucaaugagcuuc

SEQ ID NO: 2783 - RNA, 23 nt, artificial
  Oligomer
cgcacacaacucaaugagcuucc

SEQ ID NO: 2784 - RNA, 23 nt, artificial
  Oligomer
gcacacaacucaaugagcuuccu

SEQ ID NO: 2785 - RNA, 23 nt, artificial
  Oligomer
cacacaacucaaugagcuuccug

SEQ ID NO: 2786 - RNA, 23 nt, artificial
  Oligomer
uuuuccaaccacaggaaucaguc

SEQ ID NO: 2787 - RNA, 23 nt, artificial
  Oligomer
uuuccaaccacaggaaucagucc

SEQ ID NO: 2788 - RNA, 23 nt, artificial
  Oligomer
uuccaaccacaggaaucaguccc

SEQ ID NO: 2789 - RNA, 23 nt, artificial
  Oligomer
uccaaccacaggaaucagucccu

SEQ ID NO: 2790 - RNA, 23 nt, artificial
  Oligomer
ccaaccacaggaaucagucccuc

SEQ ID NO: 2791 - RNA, 23 nt, artificial
  Oligomer
uggcacacaaguguucauccuca

SEQ ID NO: 2792 - RNA, 23 nt, artificial
  Oligomer
ggcacacaaguguucauccucag

SEQ ID NO: 2793 - RNA, 23 nt, artificial
  Oligomer
gcacacaaguguucauccucagg

SEQ ID NO: 2794 - RNA, 23 nt, artificial
  Oligomer
cacacaaguguucauccucaggg

SEQ ID NO: 2795 - RNA, 23 nt, artificial
  Oligomer
acacaaguguucauccucagggu

SEQ ID NO: 2796 - RNA, 23 nt, artificial
  Oligomer
aauuuuucaagugucaaagaucc

SEQ ID NO: 2797 - RNA, 23 nt, artificial
  Oligomer
auuuuucaagugucaaagauccc

SEQ ID NO: 2798 - RNA, 23 nt, artificial
  Oligomer
uuuuucaagugucaaagauccca

SEQ ID NO: 2799 - RNA, 23 nt, artificial
  Oligomer
uuuucaagugucaaagaucccaa

SEQ ID NO: 2800 - RNA, 23 nt, artificial
  Oligomer
uuucaagugucaaagaucccaag

SEQ ID NO: 2801 - RNA, 23 nt, artificial
  Oligomer
agccacccgcacacaacucaaug

SEQ ID NO: 2802 - RNA, 23 nt, artificial
  Oligomer
gccacccgcacacaacucaauga

SEQ ID NO: 2803 - RNA, 23 nt, artificial
  Oligomer
ccacccgcacacaacucaaugag

SEQ ID NO: 2804 - RNA, 23 nt, artificial
  Oligomer
cacccgcacacaacucaaugagc

SEQ ID NO: 2805 - RNA, 23 nt, artificial
  Oligomer
acccgcacacaacucaaugagcu

SEQ ID NO: 2806 - RNA, 23 nt, artificial
  Oligomer
uugaaguucaacacuccucaaug

SEQ ID NO: 2807 - RNA, 23 nt, artificial
  Oligomer
ugaaguucaacacuccucaauga

SEQ ID NO: 2808 - RNA, 23 nt, artificial
  Oligomer
gaaguucaacacuccucaaugag

SEQ ID NO: 2809 - RNA, 23 nt, artificial
  Oligomer
aaguucaacacuccucaaugagc

SEQ ID NO: 2810 - RNA, 23 nt, artificial
  Oligomer
aguucaacacuccucaaugagca

SEQ ID NO: 2811 - RNA, 23 nt, artificial
  Oligomer
agcuguacagcuucuucuugaug

SEQ ID NO: 2812 - RNA, 23 nt, artificial
  Oligomer
gcuguacagcuucuucuugauga

SEQ ID NO: 2813 - RNA, 23 nt, artificial
  Oligomer
cuguacagcuucuucuugaugac

SEQ ID NO: 2814 - RNA, 23 nt, artificial
  Oligomer
uguacagcuucuucuugaugacu

SEQ ID NO: 2815 - RNA, 23 nt, artificial
  Oligomer
guacagcuucuucuugaugacuc

SEQ ID NO: 2816 - RNA, 23 nt, artificial
  Oligomer
ccagcucaacucugcaguacacg

SEQ ID NO: 2817 - RNA, 23 nt, artificial
  Oligomer
cagcucaacucugcaguacacga

SEQ ID NO: 2818 - RNA, 23 nt, artificial
  Oligomer
agcucaacucugcaguacacgau

SEQ ID NO: 2819 - RNA, 23 nt, artificial
  Oligomer
gcucaacucugcaguacacgaug

SEQ ID NO: 2820 - RNA, 23 nt, artificial
  Oligomer
cucaacucugcaguacacgaugg

SEQ ID NO: 2821 - RNA, 23 nt, artificial
  Oligomer
ucaacucugcaguacacgauggg

SEQ ID NO: 2822 - RNA, 23 nt, artificial
  Oligomer
cccuuccuacucuuacauucaug

SEQ ID NO: 2823 - RNA, 23 nt, artificial
  Oligomer
gcgucuguaagauagcugccuac

SEQ ID NO: 2824 - RNA, 23 nt, artificial
  Oligomer
cgucuguaagauagcugccuaca

SEQ ID NO: 2825 - RNA, 23 nt, artificial
  Oligomer
gucuguaagauagcugccuacaa

SEQ ID NO: 2826 - RNA, 23 nt, artificial
  Oligomer
ucuguaagauagcugccuacaac

SEQ ID NO: 2827 - RNA, 23 nt, artificial
  Oligomer
cuguaagauagcugccuacaaca

SEQ ID NO: 2828 - RNA, 23 nt, artificial
  Oligomer
uguaagauagcugccuacaacag

SEQ ID NO: 2829 - RNA, 23 nt, artificial
  Oligomer
guaagauagcugccuacaacagg

SEQ ID NO: 2830 - RNA, 23 nt, artificial
  Oligomer
uaagauagcugccuacaacaggu

SEQ ID NO: 2831 - RNA, 23 nt, artificial
  Oligomer
aagauagcugccuacaacagguc

SEQ ID NO: 2832 - RNA, 23 nt, artificial
  Oligomer
agauagcugccuacaacagguca

SEQ ID NO: 2833 - RNA, 23 nt, artificial
  Oligomer
augcuccgaucagaaaaacaaga

SEQ ID NO: 2834 - RNA, 23 nt, artificial
  Oligomer
ugcuccgaucagaaaaacaagau

SEQ ID NO: 2835 - RNA, 23 nt, artificial
  Oligomer
gcuccgaucagaaaaacaagaua

SEQ ID NO: 2836 - RNA, 23 nt, artificial
  Oligomer
cuccgaucagaaaaacaagauac

SEQ ID NO: 2837 - RNA, 23 nt, artificial
  Oligomer
uccgaucagaaaaacaagauaca

SEQ ID NO: 2838 - RNA, 23 nt, artificial
  Oligomer
aacaaacacacuuggucccuuca

SEQ ID NO: 2839 - RNA, 23 nt, artificial
  Oligomer
acaaacacacuuggucccuucag

SEQ ID NO: 2840 - RNA, 23 nt, artificial
  Oligomer
caaacacacuuggucccuucaga

SEQ ID NO: 2841 - RNA, 23 nt, artificial
  Oligomer
aaacacacuuggucccuucagac

SEQ ID NO: 2842 - RNA, 23 nt, artificial
  Oligomer
aacacacuuggucccuucagacc

SEQ ID NO: 2843 - RNA, 23 nt, artificial
  Oligomer
uggaugucacaccacuguuaacu

SEQ ID NO: 2844 - RNA, 23 nt, artificial
  Oligomer
ggaugucacaccacuguuaacug

SEQ ID NO: 2845 - RNA, 23 nt, artificial
  Oligomer
gaugucacaccacuguuaacugu

SEQ ID NO: 2846 - RNA, 23 nt, artificial
  Oligomer
augucacaccacuguuaacuguc

SEQ ID NO: 2847 - RNA, 23 nt, artificial
  Oligomer
ugucacaccacuguuaacuguca

SEQ ID NO: 2848 - RNA, 23 nt, artificial
  Oligomer
aaaauaauaagguacaugcuaca

SEQ ID NO: 2849 - RNA, 23 nt, artificial
  Oligomer
aaauaauaagguacaugcuacac

SEQ ID NO: 2850 - RNA, 23 nt, artificial
  Oligomer
aauaauaagguacaugcuacaca

SEQ ID NO: 2851 - RNA, 23 nt, artificial
  Oligomer
auaauaagguacaugcuacacac

SEQ ID NO: 2852 - RNA, 23 nt, artificial
  Oligomer
uaauaagguacaugcuacacaca

SEQ ID NO: 2853 - RNA, 23 nt, artificial
  Oligomer
cuucauguaaacaguucuagaug

SEQ ID NO: 2854 - RNA, 23 nt, artificial
  Oligomer
uucauguaaacaguucuagaugg

SEQ ID NO: 2855 - RNA, 23 nt, artificial
  Oligomer
ucauguaaacaguucuagaugga

SEQ ID NO: 2856 - RNA, 23 nt, artificial
  Oligomer
cauguaaacaguucuagauggaa

SEQ ID NO: 2857 - RNA, 23 nt, artificial
  Oligomer
auguaaacaguucuagauggaag

SEQ ID NO: 2858 - RNA, 23 nt, artificial
  Oligomer
uguaaacaguucuagauggaaga

SEQ ID NO: 2859 - RNA, 23 nt, artificial
  Oligomer
guaaacaguucuagauggaagac

SEQ ID NO: 2860 - RNA, 23 nt, artificial
  Oligomer
uaaacaguucuagauggaagacc

SEQ ID NO: 2861 - RNA, 23 nt, artificial
  Oligomer
ucuuacauucaugcgucuguaag

SEQ ID NO: 2862 - RNA, 23 nt, artificial
  Oligomer
cuuacauucaugcgucuguaaga

SEQ ID NO: 2863 - RNA, 23 nt, artificial
  Oligomer
uuacauucaugcgucuguaagau

SEQ ID NO: 2864 - RNA, 23 nt, artificial
  Oligomer
uacauucaugcgucuguaagaua

SEQ ID NO: 2865 - RNA, 23 nt, artificial
  Oligomer
acauucaugcgucuguaagauag

SEQ ID NO: 2866 - RNA, 23 nt, artificial
  Oligomer
caguagugaugcuccgaucagaa

SEQ ID NO: 2867 - RNA, 23 nt, artificial
  Oligomer
aguagugaugcuccgaucagaaa

SEQ ID NO: 2868 - RNA, 23 nt, artificial
  Oligomer
guagugaugcuccgaucagaaaa

SEQ ID NO: 2869 - RNA, 23 nt, artificial
  Oligomer
uagugaugcuccgaucagaaaaa

SEQ ID NO: 2870 - RNA, 23 nt, artificial
  Oligomer
agugaugcuccgaucagaaaaac

SEQ ID NO: 2871 - RNA, 23 nt, artificial
  Oligomer
cugcuaagacaagugcguccugc

SEQ ID NO: 2872 - RNA, 23 nt, artificial
  Oligomer
ugcuaagacaagugcguccugcc

SEQ ID NO: 2873 - RNA, 23 nt, artificial
  Oligomer
gcuaagacaagugcguccugccg

SEQ ID NO: 2874 - RNA, 23 nt, artificial
  Oligomer
cuaagacaagugcguccugccgc

SEQ ID NO: 2875 - RNA, 23 nt, artificial
  Oligomer
uaagacaagugcguccugccgcu

SEQ ID NO: 2876 - RNA, 23 nt, artificial
  Oligomer
ggcuuaccaacuggcuaggcauc

SEQ ID NO: 2877 - RNA, 23 nt, artificial
  Oligomer
gcuuaccaacuggcuaggcauca

SEQ ID NO: 2878 - RNA, 23 nt, artificial
  Oligomer
cuuaccaacuggcuaggcaucag

SEQ ID NO: 2879 - RNA, 23 nt, artificial
  Oligomer
uuaccaacuggcuaggcaucagc

SEQ ID NO: 2880 - RNA, 23 nt, artificial
  Oligomer
uaccaacuggcuaggcaucagca

SEQ ID NO: 2881 - RNA, 23 nt, artificial
  Oligomer
cugcaucagguuggcacacaagu

SEQ ID NO: 2882 - RNA, 23 nt, artificial
  Oligomer
ugcaucagguuggcacacaagug

SEQ ID NO: 2883 - RNA, 23 nt, artificial
  Oligomer
gcaucagguuggcacacaagugu

SEQ ID NO: 2884 - RNA, 23 nt, artificial
  Oligomer
caucagguuggcacacaaguguu

SEQ ID NO: 2885 - RNA, 23 nt, artificial
  Oligomer
aucagguuggcacacaaguguuc

SEQ ID NO: 2886 - RNA, 23 nt, artificial
  Oligomer
auacuugaacaucaaguguauuc

SEQ ID NO: 2887 - RNA, 23 nt, artificial
  Oligomer
uacuugaacaucaaguguauuca

SEQ ID NO: 2888 - RNA, 23 nt, artificial
  Oligomer
acuugaacaucaaguguauucau

SEQ ID NO: 2889 - RNA, 23 nt, artificial
  Oligomer
cuugaacaucaaguguauucaug

SEQ ID NO: 2890 - RNA, 23 nt, artificial
  Oligomer
caacaaacacacuuggucccuuc

SEQ ID NO: 2891 - RNA, 23 nt, artificial
  Oligomer
uaagguacaugcuacacacacau

SEQ ID NO: 2892 - RNA, 23 nt, artificial
  Oligomer
aagguacaugcuacacacacauc

SEQ ID NO: 2893 - RNA, 23 nt, artificial
  Oligomer
agguacaugcuacacacacaucc

SEQ ID NO: 2894 - RNA, 23 nt, artificial
  Oligomer
gguacaugcuacacacacaucca

SEQ ID NO: 2895 - RNA, 23 nt, artificial
  Oligomer
guacaugcuacacacacauccag

SEQ ID NO: 2896 - RNA, 23 nt, artificial
  Oligomer
aggcuuaaacgcagcugccaggu

SEQ ID NO: 2897 - RNA, 23 nt, artificial
  Oligomer
ggcuuaaacgcagcugccaggug

SEQ ID NO: 2898 - RNA, 23 nt, artificial
  Oligomer
gcuuaaacgcagcugccaggugu

SEQ ID NO: 2899 - RNA, 23 nt, artificial
  Oligomer
cuuaaacgcagcugccaggugua

SEQ ID NO: 2900 - RNA, 23 nt, artificial
  Oligomer
uuaaacgcagcugccagguguaa

SEQ ID NO: 2901 - RNA, 23 nt, artificial
  Oligomer
aaagaucccaagugaucccugac

SEQ ID NO: 2902 - RNA, 23 nt, artificial
  Oligomer
aagaucccaagugaucccugaca

SEQ ID NO: 2903 - RNA, 23 nt, artificial
  Oligomer
agaucccaagugaucccugacac

SEQ ID NO: 2904 - RNA, 23 nt, artificial
  Oligomer
gaucccaagugaucccugacacc

SEQ ID NO: 2905 - RNA, 23 nt, artificial
  Oligomer
aucccaagugaucccugacaccc

SEQ ID NO: 2906 - RNA, 23 nt, artificial
  Oligomer
gucccaaaggcuaggcaugguga

SEQ ID NO: 2907 - RNA, 23 nt, artificial
  Oligomer
ucccaaaggcuaggcauggugag

SEQ ID NO: 2908 - RNA, 23 nt, artificial
  Oligomer
cccaaaggcuaggcauggugagg

SEQ ID NO: 2909 - RNA, 23 nt, artificial
  Oligomer
ccaaaggcuaggcauggugagga

SEQ ID NO: 2910 - RNA, 23 nt, artificial
  Oligomer
caaaggcuaggcauggugaggac

SEQ ID NO: 2911 - RNA, 23 nt, artificial
  Oligomer
ugaugcuccgaucagaaaaacaa

SEQ ID NO: 2912 - RNA, 23 nt, artificial
  Oligomer
gaugcuccgaucagaaaaacaag

SEQ ID NO: 2913 - RNA, 23 nt, artificial
  Oligomer
uugcugaugaacucagagugccg

SEQ ID NO: 2914 - RNA, 23 nt, artificial
  Oligomer
ugcugaugaacucagagugccgg

SEQ ID NO: 2915 - RNA, 23 nt, artificial
  Oligomer
gcugaugaacucagagugccgga

SEQ ID NO: 2916 - RNA, 23 nt, artificial
  Oligomer
cugaugaacucagagugccggag

SEQ ID NO: 2917 - RNA, 23 nt, artificial
  Oligomer
ugaugaacucagagugccggagc

SEQ ID NO: 2918 - RNA, 23 nt, artificial
  Oligomer
acucaaugagcuuccugggaaac

SEQ ID NO: 2919 - RNA, 23 nt, artificial
  Oligomer
cucaaugagcuuccugggaaaca

SEQ ID NO: 2920 - RNA, 23 nt, artificial
  Oligomer
ucaaugagcuuccugggaaacac

SEQ ID NO: 2921 - RNA, 23 nt, artificial
  Oligomer
caaugagcuuccugggaaacacu

SEQ ID NO: 2922 - RNA, 23 nt, artificial
  Oligomer
aaugagcuuccugggaaacacua

SEQ ID NO: 2923 - RNA, 23 nt, artificial
  Oligomer
cugccucaguuuuccaaccacag

SEQ ID NO: 2924 - RNA, 23 nt, artificial
  Oligomer
ugccucaguuuuccaaccacagg

SEQ ID NO: 2925 - RNA, 23 nt, artificial
  Oligomer
gccucaguuuuccaaccacagga

SEQ ID NO: 2926 - RNA, 23 nt, artificial
  Oligomer
ccucaguuuuccaaccacaggaa

SEQ ID NO: 2927 - RNA, 23 nt, artificial
  Oligomer
cucaguuuuccaaccacaggaau

SEQ ID NO: 2928 - RNA, 23 nt, artificial
  Oligomer
cagcgagaacugcuaagacaagu

SEQ ID NO: 2929 - RNA, 23 nt, artificial
  Oligomer
agcgagaacugcuaagacaagug

SEQ ID NO: 2930 - RNA, 23 nt, artificial
  Oligomer
gcgagaacugcuaagacaagugc

SEQ ID NO: 2931 - RNA, 23 nt, artificial
  Oligomer
cgagaacugcuaagacaagugcg

SEQ ID NO: 2932 - RNA, 23 nt, artificial
  Oligomer
gagaacugcuaagacaagugcgu

SEQ ID NO: 2933 - RNA, 23 nt, artificial
  Oligomer
uucuagauggaagacccagaugg

SEQ ID NO: 2934 - RNA, 23 nt, artificial
  Oligomer
ucuagauggaagacccagauggc

SEQ ID NO: 2935 - RNA, 23 nt, artificial
  Oligomer
cuagauggaagacccagauggca

SEQ ID NO: 2936 - RNA, 23 nt, artificial
  Oligomer
uagauggaagacccagauggcac

SEQ ID NO: 2937 - RNA, 23 nt, artificial
  Oligomer
agauggaagacccagauggcacu

SEQ ID NO: 2938 - RNA, 23 nt, artificial
  Oligomer
aagugucaaagaucccaagugau

SEQ ID NO: 2939 - RNA, 23 nt, artificial
  Oligomer
agugucaaagaucccaagugauc

SEQ ID NO: 2940 - RNA, 23 nt, artificial
  Oligomer
gugucaaagaucccaagugaucc

SEQ ID NO: 2941 - RNA, 23 nt, artificial
  Oligomer
ugucaaagaucccaagugauccc

SEQ ID NO: 2942 - RNA, 23 nt, artificial
  Oligomer
gucaaagaucccaagugaucccu

SEQ ID NO: 2943 - RNA, 23 nt, artificial
  Oligomer
ggcguuugcugaugaacucagag

SEQ ID NO: 2944 - RNA, 23 nt, artificial
  Oligomer
gcguuugcugaugaacucagagu

SEQ ID NO: 2945 - RNA, 23 nt, artificial
  Oligomer
cguuugcugaugaacucagagug

SEQ ID NO: 2946 - RNA, 23 nt, artificial
  Oligomer
guuugcugaugaacucagagugc

SEQ ID NO: 2947 - RNA, 23 nt, artificial
  Oligomer
uuugcugaugaacucagagugcc

SEQ ID NO: 2948 - RNA, 23 nt, artificial
  Oligomer
aaaaauaauaagguacaugcuac

SEQ ID NO: 2949 - RNA, 23 nt, artificial
  Oligomer
augcuacacacacauccagcugg

SEQ ID NO: 2950 - RNA, 23 nt, artificial
  Oligomer
ugcuacacacacauccagcugga

SEQ ID NO: 2951 - RNA, 23 nt, artificial
  Oligomer
gcuacacacacauccagcuggaa

SEQ ID NO: 2952 - RNA, 23 nt, artificial
  Oligomer
cuacacacacauccagcuggaag

SEQ ID NO: 2953 - RNA, 23 nt, artificial
  Oligomer
uacacacacauccagcuggaagc

SEQ ID NO: 2954 - RNA, 23 nt, artificial
  Oligomer
cacaaguguucauccucaggguc

SEQ ID NO: 2955 - RNA, 23 nt, artificial
  Oligomer
acaaguguucauccucaggguca

SEQ ID NO: 2956 - RNA, 23 nt, artificial
  Oligomer
caucaaguguauucaugaacagu

SEQ ID NO: 2957 - RNA, 23 nt, artificial
  Oligomer
aucaaguguauucaugaacagug

SEQ ID NO: 2958 - RNA, 23 nt, artificial
  Oligomer
ucaaguguauucaugaacaguga

SEQ ID NO: 2959 - RNA, 23 nt, artificial
  Oligomer
caaguguauucaugaacagugag

SEQ ID NO: 2960 - RNA, 23 nt, artificial
  Oligomer
aaguguauucaugaacagugagu

SEQ ID NO: 2961 - RNA, 23 nt, artificial
  Oligomer
cuacucuuacauucaugcgucug

SEQ ID NO: 2962 - RNA, 23 nt, artificial
  Oligomer
uacucuuacauucaugcgucugu

SEQ ID NO: 2963 - RNA, 23 nt, artificial
  Oligomer
acucuuacauucaugcgucugua

SEQ ID NO: 2964 - RNA, 23 nt, artificial
  Oligomer
cucuuacauucaugcgucuguaa

SEQ ID NO: 2965 - RNA, 23 nt, artificial
  Oligomer
accaguaagauacacaaaccacc

SEQ ID NO: 2966 - RNA, 23 nt, artificial
  Oligomer
ccaguaagauacacaaaccaccu

SEQ ID NO: 2967 - RNA, 23 nt, artificial
  Oligomer
caguaagauacacaaaccaccuc

SEQ ID NO: 2968 - RNA, 23 nt, artificial
  Oligomer
aguaagauacacaaaccaccucc

SEQ ID NO: 2969 - RNA, 23 nt, artificial
  Oligomer
guaagauacacaaaccaccucca

SEQ ID NO: 2970 - RNA, 23 nt, artificial
  Oligomer
gucacaccacuguuaacugucag

SEQ ID NO: 2971 - RNA, 23 nt, artificial
  Oligomer
aauaagguacaugcuacacacac

SEQ ID NO: 2972 - RNA, 23 nt, artificial
  Oligomer
auaagguacaugcuacacacaca

SEQ ID NO: 2973 - RNA, 23 nt, artificial
  Oligomer
acacauccagcuggaagccuugu

SEQ ID NO: 2974 - RNA, 23 nt, artificial
  Oligomer
cacauccagcuggaagccuuguu

SEQ ID NO: 2975 - RNA, 23 nt, artificial
  Oligomer
acauccagcuggaagccuuguug

SEQ ID NO: 2976 - RNA, 23 nt, artificial
  Oligomer
cauccagcuggaagccuuguugg

SEQ ID NO: 2977 - RNA, 23 nt, artificial
  Oligomer
auccagcuggaagccuuguuggc

SEQ ID NO: 2978 - RNA, 23 nt, artificial
  Oligomer
ggccccuaagccuuuguuucaug

SEQ ID NO: 2979 - RNA, 23 nt, artificial
  Oligomer
aaccacaggaaucagucccucag

SEQ ID NO: 2980 - RNA, 23 nt, artificial
  Oligomer
accacaggaaucagucccucagc

SEQ ID NO: 2981 - RNA, 23 nt, artificial
  Oligomer
ccacaggaaucagucccucagcu

SEQ ID NO: 2982 - RNA, 23 nt, artificial
  Oligomer
cacaggaaucagucccucagcuc

SEQ ID NO: 2983 - RNA, 23 nt, artificial
  Oligomer
acaggaaucagucccucagcucc

SEQ ID NO: 2984 - RNA, 23 nt, artificial
  Oligomer
ccucaaugagcagcuguuccgag

SEQ ID NO: 2985 - RNA, 23 nt, artificial
  Oligomer
cucaaugagcagcuguuccgagc

SEQ ID NO: 2986 - RNA, 23 nt, artificial
  Oligomer
ucaaugagcagcuguuccgagcu

SEQ ID NO: 2987 - RNA, 23 nt, artificial
  Oligomer
caaugagcagcuguuccgagcug

SEQ ID NO: 2988 - RNA, 23 nt, artificial
  Oligomer
aaugagcagcuguuccgagcugu

SEQ ID NO: 2989 - RNA, 23 nt, artificial
  Oligomer
aggccaggcgcaguaguucuuug

SEQ ID NO: 2990 - RNA, 23 nt, artificial
  Oligomer
ggccaggcgcaguaguucuuugc

SEQ ID NO: 2991 - RNA, 23 nt, artificial
  Oligomer
gccaggcgcaguaguucuuugcc

SEQ ID NO: 2992 - RNA, 23 nt, artificial
  Oligomer
ccaggcgcaguaguucuuugccc

SEQ ID NO: 2993 - RNA, 23 nt, artificial
  Oligomer
caggcgcaguaguucuuugccca

SEQ ID NO: 2994 - RNA, 23 nt, artificial
  Oligomer
caaguguucauccucagggucac

SEQ ID NO: 2995 - RNA, 23 nt, artificial
  Oligomer
auucaugaacagugaguaucuua

SEQ ID NO: 2996 - RNA, 23 nt, artificial
  Oligomer
ccgaucagaaaaacaagauacaa

SEQ ID NO: 2997 - RNA, 23 nt, artificial
  Oligomer
cgaucagaaaaacaagauacaaa

SEQ ID NO: 2998 - RNA, 23 nt, artificial
  Oligomer
gaucagaaaaacaagauacaaaa

SEQ ID NO: 2999 - RNA, 23 nt, artificial
  Oligomer
gaccaguaagauacacaaaccac

SEQ ID NO: 3000 - RNA, 23 nt, artificial
  Oligomer
acacacacauccagcuggaagcc

SEQ ID NO: 3001 - RNA, 23 nt, artificial
  Oligomer
cacacacauccagcuggaagccu

SEQ ID NO: 3002 - RNA, 23 nt, artificial
  Oligomer
acacacauccagcuggaagccuu

SEQ ID NO: 3003 - RNA, 23 nt, artificial
  Oligomer
cuuuguuucaugcuacaguacug

SEQ ID NO: 3004 - RNA, 23 nt, artificial
  Oligomer
uuuguuucaugcuacaguacuga

SEQ ID NO: 3005 - RNA, 23 nt, artificial
  Oligomer
uuguuucaugcuacaguacugag

SEQ ID NO: 3006 - RNA, 23 nt, artificial
  Oligomer
uguuucaugcuacaguacugagg

SEQ ID NO: 3007 - RNA, 23 nt, artificial
  Oligomer
guuucaugcuacaguacugaggg

SEQ ID NO: 3008 - RNA, 23 nt, artificial
  Oligomer
ucagcgagaacugcuaagacaag

SEQ ID NO: 3009 - RNA, 23 nt, artificial
  Oligomer
uggcuuaccaacuggcuaggcau

SEQ ID NO: 3010 - RNA, 23 nt, artificial
  Oligomer
uauucaugaacagugaguaucuu

SEQ ID NO: 3011 - RNA, 23 nt, artificial
  Oligomer
aaacaguucuagauggaagaccc

SEQ ID NO: 3012 - RNA, 23 nt, artificial
  Oligomer
aacaguucuagauggaagaccca

SEQ ID NO: 3013 - RNA, 23 nt, artificial
  Oligomer
caguucuagauggaagacccaga

SEQ ID NO: 3014 - RNA, 23 nt, artificial
  Oligomer
aguucuagauggaagacccagau

SEQ ID NO: 3015 - RNA, 23 nt, artificial
  Oligomer
guucuagauggaagacccagaug

SEQ ID NO: 3016 - RNA, 23 nt, artificial
  Oligomer
uaagauacacaaaccaccuccac

SEQ ID NO: 3017 - RNA, 23 nt, artificial
  Oligomer
cccgcacacaacucaaugagcuu

SEQ ID NO: 3018 - RNA, 23 nt, artificial
  Oligomer
gaugaacucagagugccggagcg

SEQ ID NO: 3019 - RNA, 23 nt, artificial
  Oligomer
augaacucagagugccggagcgu

SEQ ID NO: 3020 - RNA, 23 nt, artificial
  Oligomer
ugccgcuugaaugggugugcgaa

SEQ ID NO: 3021 - RNA, 23 nt, artificial
  Oligomer
gccgcuugaaugggugugcgaac

SEQ ID NO: 3022 - RNA, 23 nt, artificial
  Oligomer
ccgcuugaaugggugugcgaacc

SEQ ID NO: 3023 - RNA, 23 nt, artificial
  Oligomer
cgcuugaaugggugugcgaaccc

SEQ ID NO: 3024 - RNA, 23 nt, artificial
  Oligomer
gcuugaaugggugugcgaacccg

SEQ ID NO: 3025 - RNA, 23 nt, artificial
  Oligomer
ccaaaaguucagucgucucuguc

SEQ ID NO: 3026 - RNA, 23 nt, artificial
  Oligomer
caaaaguucagucgucucugucu

SEQ ID NO: 3027 - RNA, 23 nt, artificial
  Oligomer
guucaacacuccucaaugagcag

SEQ ID NO: 3028 - RNA, 23 nt, artificial
  Oligomer
uucaacacuccucaaugagcagc

SEQ ID NO: 3029 - RNA, 23 nt, artificial
  Oligomer
ucaacacuccucaaugagcagcu

SEQ ID NO: 3030 - RNA, 23 nt, artificial
  Oligomer
caacacuccucaaugagcagcug

SEQ ID NO: 3031 - RNA, 23 nt, artificial
  Oligomer
cgagcuguacagcuucuucuuga

SEQ ID NO: 3032 - RNA, 23 nt, artificial
  Oligomer
gagcuguacagcuucuucuugau

SEQ ID NO: 3033 - RNA, 23 nt, artificial
  Oligomer
agcuucuucuugaugacucggaa

SEQ ID NO: 3034 - RNA, 23 nt, artificial
  Oligomer
gcuucuucuugaugacucggaag

SEQ ID NO: 3035 - RNA, 23 nt, artificial
  Oligomer
cuucuucuugaugacucggaagc

SEQ ID NO: 3036 - RNA, 23 nt, artificial
  Oligomer
uucuucuugaugacucggaagcc

SEQ ID NO: 3037 - RNA, 23 nt, artificial
  Oligomer
ucuucuugaugacucggaagcca

SEQ ID NO: 3038 - RNA, 23 nt, artificial
  Oligomer
gcaguaguucuuugcccaccugg

SEQ ID NO: 3039 - RNA, 23 nt, artificial
  Oligomer
caguaguucuuugcccaccuggc

SEQ ID NO: 3040 - RNA, 23 nt, artificial
  Oligomer
aguaguucuuugcccaccuggcu

SEQ ID NO: 3041 - RNA, 23 nt, artificial
  Oligomer
guaguucuuugcccaccuggcuu

SEQ ID NO: 3042 - RNA, 23 nt, artificial
  Oligomer
uaguucuuugcccaccuggcuua

SEQ ID NO: 3043 - RNA, 23 nt, artificial
  Oligomer
aguguauucaugaacagugagua

SEQ ID NO: 3044 - RNA, 23 nt, artificial
  Oligomer
aucuucauguaaacaguucuaga

SEQ ID NO: 3045 - RNA, 23 nt, artificial
  Oligomer
ucuucauguaaacaguucuagau

SEQ ID NO: 3046 - RNA, 23 nt, artificial
  Oligomer
acaguucuagauggaagacccag

SEQ ID NO: 3047 - RNA, 23 nt, artificial
  Oligomer
cagcugccagguguaauuuuuca

SEQ ID NO: 3048 - RNA, 23 nt, artificial
  Oligomer
agcugccagguguaauuuuucaa

SEQ ID NO: 3049 - RNA, 23 nt, artificial
  Oligomer
gcugccagguguaauuuuucaag

SEQ ID NO: 3050 - RNA, 23 nt, artificial
  Oligomer
cugccagguguaauuuuucaagu

SEQ ID NO: 3051 - RNA, 23 nt, artificial
  Oligomer
ugccagguguaauuuuucaagug

SEQ ID NO: 3052 - RNA, 23 nt, artificial
  Oligomer
ccccauccagguaagccgugucu

SEQ ID NO: 3053 - RNA, 23 nt, artificial
  Oligomer
cccauccagguaagccgugucuu

SEQ ID NO: 3054 - RNA, 23 nt, artificial
  Oligomer
ccauccagguaagccgugucuuc

SEQ ID NO: 3055 - RNA, 23 nt, artificial
  Oligomer
cauccagguaagccgugucuucc

SEQ ID NO: 3056 - RNA, 23 nt, artificial
  Oligomer
auccagguaagccgugucuuccu

SEQ ID NO: 3057 - RNA, 23 nt, artificial
  Oligomer
ucacaccacuguuaacugucagu

SEQ ID NO: 3058 - RNA, 23 nt, artificial
  Oligomer
cacaccacuguuaacugucagua

SEQ ID NO: 3059 - RNA, 23 nt, artificial
  Oligomer
uacaugcuacacacacauccagc

SEQ ID NO: 3060 - RNA, 23 nt, artificial
  Oligomer
acaugcuacacacacauccagcu

SEQ ID NO: 3061 - RNA, 23 nt, artificial
  Oligomer
caugcuacacacacauccagcug

SEQ ID NO: 3062 - RNA, 23 nt, artificial
  Oligomer
ggcccccucagguugaaguucaa

SEQ ID NO: 3063 - RNA, 23 nt, artificial
  Oligomer
gcccccucagguugaaguucaac

SEQ ID NO: 3064 - RNA, 23 nt, artificial
  Oligomer
cccccucagguugaaguucaaca

SEQ ID NO: 3065 - RNA, 23 nt, artificial
  Oligomer
ccccucagguugaaguucaacac

SEQ ID NO: 3066 - RNA, 23 nt, artificial
  Oligomer
cccucagguugaaguucaacacu

SEQ ID NO: 3067 - RNA, 23 nt, artificial
  Oligomer
cuugaaugggugugcgaacccgu

SEQ ID NO: 3068 - RNA, 23 nt, artificial
  Oligomer
aaauauugcauaggucuuaauac

SEQ ID NO: 3069 - RNA, 23 nt, artificial
  Oligomer
aauauugcauaggucuuaauacu

SEQ ID NO: 3070 - RNA, 23 nt, artificial
  Oligomer
auauugcauaggucuuaauacuu

SEQ ID NO: 3071 - RNA, 23 nt, artificial
  Oligomer
uauugcauaggucuuaauacuug

SEQ ID NO: 3072 - RNA, 23 nt, artificial
  Oligomer
auugcauaggucuuaauacuuga

SEQ ID NO: 3073 - RNA, 23 nt, artificial
  Oligomer
gaacagugaguaucuuaucuuca

SEQ ID NO: 3074 - RNA, 23 nt, artificial
  Oligomer
aacagugaguaucuuaucuucau

SEQ ID NO: 3075 - RNA, 23 nt, artificial
  Oligomer
gcagcugccagguguaauuuuuc

SEQ ID NO: 3076 - RNA, 23 nt, artificial
  Oligomer
uaauuuuucaagugucaaagauc

SEQ ID NO: 3077 - RNA, 23 nt, artificial
  Oligomer
cauucaugcgucuguaagauagc

SEQ ID NO: 3078 - RNA, 23 nt, artificial
  Oligomer
aggcuaggcauggugaggacaga

SEQ ID NO: 3079 - RNA, 23 nt, artificial
  Oligomer
ggcuaggcauggugaggacagac

SEQ ID NO: 3080 - RNA, 23 nt, artificial
  Oligomer
gcuaggcauggugaggacagacg

SEQ ID NO: 3081 - RNA, 23 nt, artificial
  Oligomer
cuaggcauggugaggacagacgc

SEQ ID NO: 3082 - RNA, 23 nt, artificial
  Oligomer
uaggcauggugaggacagacgcc

SEQ ID NO: 3083 - RNA, 23 nt, artificial
  Oligomer
uggccccuaagccuuuguuucau

SEQ ID NO: 3084 - RNA, 23 nt, artificial
  Oligomer
caacucugcaguacacgaugggg

SEQ ID NO: 3085 - RNA, 23 nt, artificial
  Oligomer
aacucugcaguacacgauggggg

SEQ ID NO: 3086 - RNA, 23 nt, artificial
  Oligomer
gccagguguaauuuuucaagugu

SEQ ID NO: 3087 - RNA, 23 nt, artificial
  Oligomer
uucaagugucaaagaucccaagu

SEQ ID NO: 3088 - RNA, 23 nt, artificial
  Oligomer
ucaagugucaaagaucccaagug

SEQ ID NO: 3089 - RNA, 23 nt, artificial
  Oligomer
caagugucaaagaucccaaguga

SEQ ID NO: 3090 - RNA, 23 nt, artificial
  Oligomer
ccuacaacaggucaguagugaug

SEQ ID NO: 3091 - RNA, 23 nt, artificial
  Oligomer
cuacaacaggucaguagugaugc

SEQ ID NO: 3092 - RNA, 23 nt, artificial
  Oligomer
uacaacaggucaguagugaugcu

SEQ ID NO: 3093 - RNA, 23 nt, artificial
  Oligomer
acaacaggucaguagugaugcuc

SEQ ID NO: 3094 - RNA, 23 nt, artificial
  Oligomer
caacaggucaguagugaugcucc

SEQ ID NO: 3095 - RNA, 23 nt, artificial
  Oligomer
gcucucuggaugucacaccacug

SEQ ID NO: 3096 - RNA, 23 nt, artificial
  Oligomer
cucucuggaugucacaccacugu

SEQ ID NO: 3097 - RNA, 23 nt, artificial
  Oligomer
ucucuggaugucacaccacuguu

SEQ ID NO: 3098 - RNA, 23 nt, artificial
  Oligomer
cucuggaugucacaccacuguua

SEQ ID NO: 3099 - RNA, 23 nt, artificial
  Oligomer
acaccacuguuaacugucaguaa

SEQ ID NO: 3100 - RNA, 23 nt, artificial
  Oligomer
ccacuguuaacugucaguaacaa

SEQ ID NO: 3101 - RNA, 23 nt, artificial
  Oligomer
cacuguuaacugucaguaacaaa

SEQ ID NO: 3102 - RNA, 23 nt, artificial
  Oligomer
acuguuaacugucaguaacaaaa

SEQ ID NO: 3103 - RNA, 23 nt, artificial
  Oligomer
cuguuaacugucaguaacaaaaa

SEQ ID NO: 3104 - RNA, 23 nt, artificial
  Oligomer
uguuaacugucaguaacaaaaau

SEQ ID NO: 3105 - RNA, 23 nt, artificial
  Oligomer
ggagaguuggcggagcuaaacag

SEQ ID NO: 3106 - RNA, 23 nt, artificial
  Oligomer
gagaguuggcggagcuaaacagc

SEQ ID NO: 3107 - RNA, 23 nt, artificial
  Oligomer
agaguuggcggagcuaaacagcc

SEQ ID NO: 3108 - RNA, 23 nt, artificial
  Oligomer
gaguuggcggagcuaaacagccc

SEQ ID NO: 3109 - RNA, 23 nt, artificial
  Oligomer
aguuggcggagcuaaacagcccc

SEQ ID NO: 3110 - RNA, 23 nt, artificial
  Oligomer
accaacuggcuaggcaucagcag

SEQ ID NO: 3111 - RNA, 23 nt, artificial
  Oligomer
ccaacuggcuaggcaucagcagg

SEQ ID NO: 3112 - RNA, 23 nt, artificial
  Oligomer
caacuggcuaggcaucagcaggc

SEQ ID NO: 3113 - RNA, 23 nt, artificial
  Oligomer
aacuggcuaggcaucagcaggcg

SEQ ID NO: 3114 - RNA, 23 nt, artificial
  Oligomer
acagugaguaucuuaucuucaug

SEQ ID NO: 3115 - RNA, 23 nt, artificial
  Oligomer
cuuaucuucauguaaacaguucu

SEQ ID NO: 3116 - RNA, 23 nt, artificial
  Oligomer
uuaucuucauguaaacaguucua

SEQ ID NO: 3117 - RNA, 23 nt, artificial
  Oligomer
uaucuucauguaaacaguucuag

SEQ ID NO: 3118 - RNA, 23 nt, artificial
  Oligomer
aguguucauccucagggucacug

SEQ ID NO: 3119 - RNA, 23 nt, artificial
  Oligomer
guguucauccucagggucacuga

SEQ ID NO: 3120 - RNA, 23 nt, artificial
  Oligomer
uguucauccucagggucacugag

SEQ ID NO: 3121 - RNA, 23 nt, artificial
  Oligomer
guucauccucagggucacugagc

SEQ ID NO: 3122 - RNA, 23 nt, artificial
  Oligomer
uucauccucagggucacugagca

SEQ ID NO: 3123 - RNA, 23 nt, artificial
  Oligomer
ccagguguaauuuuucaaguguc

SEQ ID NO: 3124 - RNA, 23 nt, artificial
  Oligomer
cagguguaauuuuucaaguguca

SEQ ID NO: 3125 - RNA, 23 nt, artificial
  Oligomer
agguguaauuuuucaagugucaa

SEQ ID NO: 3126 - RNA, 23 nt, artificial
  Oligomer
gguguaauuuuucaagugucaaa

SEQ ID NO: 3127 - RNA, 23 nt, artificial
  Oligomer
guguaauuuuucaagugucaaag

SEQ ID NO: 3128 - RNA, 23 nt, artificial
  Oligomer
ucccaagugaucccugacaccca

SEQ ID NO: 3129 - RNA, 23 nt, artificial
  Oligomer
caccccuuccuacucuuacauuc

SEQ ID NO: 3130 - RNA, 23 nt, artificial
  Oligomer
accccuuccuacucuuacauuca

SEQ ID NO: 3131 - RNA, 23 nt, artificial
  Oligomer
ccccuuccuacucuuacauucau

SEQ ID NO: 3132 - RNA, 23 nt, artificial
  Oligomer
ugccuacaacaggucaguaguga

SEQ ID NO: 3133 - RNA, 23 nt, artificial
  Oligomer
gccuacaacaggucaguagugau

SEQ ID NO: 3134 - RNA, 23 nt, artificial
  Oligomer
ggucccuucagaccaguaagaua

SEQ ID NO: 3135 - RNA, 23 nt, artificial
  Oligomer
cuggaugucacaccacuguuaac

SEQ ID NO: 3136 - RNA, 23 nt, artificial
  Oligomer
cagccacccgcacacaacucaau

SEQ ID NO: 3137 - RNA, 23 nt, artificial
  Oligomer
ugagcuuccugggaaacacuauu

SEQ ID NO: 3138 - RNA, 23 nt, artificial
  Oligomer
gagcuuccugggaaacacuauuc

SEQ ID NO: 3139 - RNA, 23 nt, artificial
  Oligomer
agcuuccugggaaacacuauucc

SEQ ID NO: 3140 - RNA, 23 nt, artificial
  Oligomer
gcuuccugggaaacacuauuccc

SEQ ID NO: 3141 - RNA, 23 nt, artificial
  Oligomer
cuuccugggaaacacuauucccc

SEQ ID NO: 3142 - RNA, 23 nt, artificial
  Oligomer
cgcggucagcgagaacugcuaag

SEQ ID NO: 3143 - RNA, 23 nt, artificial
  Oligomer
gcggucagcgagaacugcuaaga

SEQ ID NO: 3144 - RNA, 23 nt, artificial
  Oligomer
cggucagcgagaacugcuaagac

SEQ ID NO: 3145 - RNA, 23 nt, artificial
  Oligomer
ggucagcgagaacugcuaagaca

SEQ ID NO: 3146 - RNA, 23 nt, artificial
  Oligomer
gucagcgagaacugcuaagacaa

SEQ ID NO: 3147 - RNA, 23 nt, artificial
  Oligomer
ccucagguugaaguucaacacuc

SEQ ID NO: 3148 - RNA, 23 nt, artificial
  Oligomer
cucagguugaaguucaacacucc

SEQ ID NO: 3149 - RNA, 23 nt, artificial
  Oligomer
guguauucaugaacagugaguau

SEQ ID NO: 3150 - RNA, 23 nt, artificial
  Oligomer
uguauucaugaacagugaguauc

SEQ ID NO: 3151 - RNA, 23 nt, artificial
  Oligomer
guauucaugaacagugaguaucu

SEQ ID NO: 3152 - RNA, 23 nt, artificial
  Oligomer
aacaggucaguagugaugcuccg

SEQ ID NO: 3153 - RNA, 23 nt, artificial
  Oligomer
gugaugcuccgaucagaaaaaca

SEQ ID NO: 3154 - RNA, 23 nt, artificial
  Oligomer
augagcuuccugggaaacacuau

SEQ ID NO: 3155 - RNA, 23 nt, artificial
  Oligomer
agguugaaguucaacacuccuca

SEQ ID NO: 3156 - RNA, 23 nt, artificial
  Oligomer
gguugaaguucaacacuccucaa

SEQ ID NO: 3157 - RNA, 23 nt, artificial
  Oligomer
guugaaguucaacacuccucaau

SEQ ID NO: 3158 - RNA, 23 nt, artificial
  Oligomer
aacacuccucaaugagcagcugu

SEQ ID NO: 3159 - RNA, 23 nt, artificial
  Oligomer
agaacugcuaagacaagugcguc

SEQ ID NO: 3160 - RNA, 23 nt, artificial
  Oligomer
gaacugcuaagacaagugcgucc

SEQ ID NO: 3161 - RNA, 23 nt, artificial
  Oligomer
aacugcuaagacaagugcguccu

SEQ ID NO: 3162 - RNA, 23 nt, artificial
  Oligomer
acugcuaagacaagugcguccug

SEQ ID NO: 3163 - RNA, 23 nt, artificial
  Oligomer
cgcagcugccagguguaauuuuu

SEQ ID NO: 3164 - RNA, 23 nt, artificial
  Oligomer
caggucaguagugaugcuccgau

SEQ ID NO: 3165 - RNA, 23 nt, artificial
  Oligomer
aggucaguagugaugcuccgauc

SEQ ID NO: 3166 - RNA, 23 nt, artificial
  Oligomer
ggucaguagugaugcuccgauca

SEQ ID NO: 3167 - RNA, 23 nt, artificial
  Oligomer
gucaguagugaugcuccgaucag

SEQ ID NO: 3168 - RNA, 23 nt, artificial
  Oligomer
ucaguagugaugcuccgaucaga

SEQ ID NO: 3169 - RNA, 23 nt, artificial
  Oligomer
ucuggaugucacaccacuguuaa

SEQ ID NO: 3170 - RNA, 23 nt, artificial
  Oligomer
uuucaugcuacaguacugagggg

SEQ ID NO: 3171 - RNA, 23 nt, artificial
  Oligomer
caccuuagguggcugccucaguu

SEQ ID NO: 3172 - RNA, 23 nt, artificial
  Oligomer
accuuagguggcugccucaguuu

SEQ ID NO: 3173 - RNA, 23 nt, artificial
  Oligomer
ccuuagguggcugccucaguuuu

SEQ ID NO: 3174 - RNA, 23 nt, artificial
  Oligomer
cuuagguggcugccucaguuuuc

SEQ ID NO: 3175 - RNA, 23 nt, artificial
  Oligomer
uuagguggcugccucaguuuucc

SEQ ID NO: 3176 - RNA, 23 nt, artificial
  Oligomer
ucaguuuuccaaccacaggaauc

SEQ ID NO: 3177 - RNA, 23 nt, artificial
  Oligomer
caguuuuccaaccacaggaauca

SEQ ID NO: 3178 - RNA, 23 nt, artificial
  Oligomer
aguuuuccaaccacaggaaucag

SEQ ID NO: 3179 - RNA, 23 nt, artificial
  Oligomer
guuuuccaaccacaggaaucagu

SEQ ID NO: 3180 - RNA, 23 nt, artificial
  Oligomer
aaaaguucagucgucucugucuu

SEQ ID NO: 3181 - RNA, 23 nt, artificial
  Oligomer
aaaguucagucgucucugucuug

SEQ ID NO: 3182 - RNA, 23 nt, artificial
  Oligomer
aaguucagucgucucugucuugg

SEQ ID NO: 3183 - RNA, 23 nt, artificial
  Oligomer
cagguugaaguucaacacuccuc

SEQ ID NO: 3184 - RNA, 23 nt, artificial
  Oligomer
ucuuaucuucauguaaacaguuc

SEQ ID NO: 3185 - RNA, 23 nt, artificial
  Oligomer
acucugcaguacacgauggggga

SEQ ID NO: 3186 - RNA, 23 nt, artificial
  Oligomer
auucaugcgucuguaagauagcu

SEQ ID NO: 3187 - RNA, 23 nt, artificial
  Oligomer
uucaugcgucuguaagauagcug

SEQ ID NO: 3188 - RNA, 23 nt, artificial
  Oligomer
ucaugcgucuguaagauagcugc

SEQ ID NO: 3189 - RNA, 23 nt, artificial
  Oligomer
cgccagggcguuugcugaugaac

SEQ ID NO: 3190 - RNA, 23 nt, artificial
  Oligomer
gccagggcguuugcugaugaacu

SEQ ID NO: 3191 - RNA, 23 nt, artificial
  Oligomer
ccagggcguuugcugaugaacuc

SEQ ID NO: 3192 - RNA, 23 nt, artificial
  Oligomer
cagggcguuugcugaugaacuca

SEQ ID NO: 3193 - RNA, 23 nt, artificial
  Oligomer
agggcguuugcugaugaacucag

SEQ ID NO: 3194 - RNA, 23 nt, artificial
  Oligomer
uggucccuucagaccaguaagau

SEQ ID NO: 3195 - RNA, 23 nt, artificial
  Oligomer
uaagccuuuguuucaugcuacag

SEQ ID NO: 3196 - RNA, 23 nt, artificial
  Oligomer
aagccuuuguuucaugcuacagu

SEQ ID NO: 3197 - RNA, 23 nt, artificial
  Oligomer
agccuuuguuucaugcuacagua

SEQ ID NO: 3198 - RNA, 23 nt, artificial
  Oligomer
gccuuuguuucaugcuacaguac

SEQ ID NO: 3199 - RNA, 23 nt, artificial
  Oligomer
ccuuuguuucaugcuacaguacu

SEQ ID NO: 3200 - RNA, 23 nt, artificial
  Oligomer
agcugcaucagguuggcacacaa

SEQ ID NO: 3201 - RNA, 23 nt, artificial
  Oligomer
gcugcaucagguuggcacacaag

SEQ ID NO: 3202 - RNA, 23 nt, artificial
  Oligomer
acacacuuggucccuucagacca

SEQ ID NO: 3203 - RNA, 23 nt, artificial
  Oligomer
uuggucccuucagaccaguaaga

SEQ ID NO: 3204 - RNA, 23 nt, artificial
  Oligomer
gcgcggucagcgagaacugcuaa

SEQ ID NO: 3205 - RNA, 23 nt, artificial
  Oligomer
aguucagucgucucugucuugga

SEQ ID NO: 3206 - RNA, 23 nt, artificial
  Oligomer
guucagucgucucugucuuggag

SEQ ID NO: 3207 - RNA, 23 nt, artificial
  Oligomer
ucaaagaucccaagugaucccug

SEQ ID NO: 3208 - RNA, 23 nt, artificial
  Oligomer
caaagaucccaagugaucccuga

SEQ ID NO: 3209 - RNA, 23 nt, artificial
  Oligomer
gcccagcugcucucuggauguca

SEQ ID NO: 3210 - RNA, 23 nt, artificial
  Oligomer
cccagcugcucucuggaugucac

SEQ ID NO: 3211 - RNA, 23 nt, artificial
  Oligomer
ccagcugcucucuggaugucaca

SEQ ID NO: 3212 - RNA, 23 nt, artificial
  Oligomer
uucagucgucucugucuuggagg

SEQ ID NO: 3213 - RNA, 23 nt, artificial
  Oligomer
ucagucgucucugucuuggaggg

SEQ ID NO: 3214 - RNA, 23 nt, artificial
  Oligomer
agucgucucugucuuggagggca

SEQ ID NO: 3215 - RNA, 23 nt, artificial
  Oligomer
cuguuccgagcuguacagcuucu

SEQ ID NO: 3216 - RNA, 23 nt, artificial
  Oligomer
uguuccgagcuguacagcuucuu

SEQ ID NO: 3217 - RNA, 23 nt, artificial
  Oligomer
guuccgagcuguacagcuucuuc

SEQ ID NO: 3218 - RNA, 23 nt, artificial
  Oligomer
uuccgagcuguacagcuucuucu

SEQ ID NO: 3219 - RNA, 23 nt, artificial
  Oligomer
uccgagcuguacagcuucuucuu

SEQ ID NO: 3220 - RNA, 23 nt, artificial
  Oligomer
uacagcuucuucuugaugacucg

SEQ ID NO: 3221 - RNA, 23 nt, artificial
  Oligomer
aauacuugaacaucaaguguauu

SEQ ID NO: 3222 - RNA, 23 nt, artificial
  Oligomer
guaucuuaucuucauguaaacag

SEQ ID NO: 3223 - RNA, 23 nt, artificial
  Oligomer
uaucuuaucuucauguaaacagu

SEQ ID NO: 3224 - RNA, 23 nt, artificial
  Oligomer
aucuuaucuucauguaaacaguu

SEQ ID NO: 3225 - RNA, 23 nt, artificial
  Oligomer
gccagcucaacucugcaguacac

SEQ ID NO: 3226 - RNA, 23 nt, artificial
  Oligomer
aaaggcuaggcauggugaggaca

SEQ ID NO: 3227 - RNA, 23 nt, artificial
  Oligomer
gauagcugccuacaacaggucag

SEQ ID NO: 3228 - RNA, 23 nt, artificial
  Oligomer
auagcugccuacaacaggucagu

SEQ ID NO: 3229 - RNA, 23 nt, artificial
  Oligomer
uagcugccuacaacaggucagua

SEQ ID NO: 3230 - RNA, 23 nt, artificial
  Oligomer
agcugccuacaacaggucaguag

SEQ ID NO: 3231 - RNA, 23 nt, artificial
  Oligomer
acaggucaguagugaugcuccga

SEQ ID NO: 3232 - RNA, 23 nt, artificial
  Oligomer
uuccugggaaacacuauuccccc

SEQ ID NO: 3233 - RNA, 23 nt, artificial
  Oligomer
uccugggaaacacuauuccccca

SEQ ID NO: 3234 - RNA, 23 nt, artificial
  Oligomer
agguggcugccucaguuuuccaa

SEQ ID NO: 3235 - RNA, 23 nt, artificial
  Oligomer
gguggcugccucaguuuuccaac

SEQ ID NO: 3236 - RNA, 23 nt, artificial
  Oligomer
guggcugccucaguuuuccaacc

SEQ ID NO: 3237 - RNA, 23 nt, artificial
  Oligomer
uggcugccucaguuuuccaacca

SEQ ID NO: 3238 - RNA, 23 nt, artificial
  Oligomer
ggcugccucaguuuuccaaccac

SEQ ID NO: 3239 - RNA, 23 nt, artificial
  Oligomer
gcugccucaguuuuccaaccaca

SEQ ID NO: 3240 - RNA, 23 nt, artificial
  Oligomer
caaccacaggaaucagucccuca

SEQ ID NO: 3241 - RNA, 23 nt, artificial
  Oligomer
uaggccaggcgcaguaguucuuu

SEQ ID NO: 3242 - RNA, 23 nt, artificial
  Oligomer
ucagguuggcacacaaguguuca

SEQ ID NO: 3243 - RNA, 23 nt, artificial
  Oligomer
cagguuggcacacaaguguucau

SEQ ID NO: 3244 - RNA, 23 nt, artificial
  Oligomer
agguuggcacacaaguguucauc

SEQ ID NO: 3245 - RNA, 23 nt, artificial
  Oligomer
gguuggcacacaaguguucaucc

SEQ ID NO: 3246 - RNA, 23 nt, artificial
  Oligomer
guuggcacacaaguguucauccu

SEQ ID NO: 3247 - RNA, 23 nt, artificial
  Oligomer
uugcauaggucuuaauacuugaa

SEQ ID NO: 3248 - RNA, 23 nt, artificial
  Oligomer
gcauaggucuuaauacuugaaca

SEQ ID NO: 3249 - RNA, 23 nt, artificial
  Oligomer
cauaggucuuaauacuugaacau

SEQ ID NO: 3250 - RNA, 23 nt, artificial
  Oligomer
auaggucuuaauacuugaacauc

SEQ ID NO: 3251 - RNA, 23 nt, artificial
  Oligomer
uaggucuuaauacuugaacauca

SEQ ID NO: 3252 - RNA, 23 nt, artificial
  Oligomer
aggucuuaauacuugaacaucaa

SEQ ID NO: 3253 - RNA, 23 nt, artificial
  Oligomer
ggucuuaauacuugaacaucaag

SEQ ID NO: 3254 - RNA, 23 nt, artificial
  Oligomer
gucuuaauacuugaacaucaagu

SEQ ID NO: 3255 - RNA, 23 nt, artificial
  Oligomer
aaguguucauccucagggucacu

SEQ ID NO: 3256 - RNA, 23 nt, artificial
  Oligomer
gggagaguuggcggagcuaaaca

SEQ ID NO: 3257 - RNA, 23 nt, artificial
  Oligomer
uuggcacacaaguguucauccuc

SEQ ID NO: 3258 - RNA, 23 nt, artificial
  Oligomer
ugcauaggucuuaauacuugaac

SEQ ID NO: 3259 - RNA, 23 nt, artificial
  Oligomer
ugcgucuguaagauagcugccua

SEQ ID NO: 3260 - RNA, 23 nt, artificial
  Oligomer
cugccuacaacaggucaguagug

SEQ ID NO: 3261 - RNA, 23 nt, artificial
  Oligomer
cacuuggucccuucagaccagua

SEQ ID NO: 3262 - RNA, 23 nt, artificial
  Oligomer
acuuggucccuucagaccaguaa

SEQ ID NO: 3263 - RNA, 23 nt, artificial
  Oligomer
cuuggucccuucagaccaguaag

SEQ ID NO: 3264 - RNA, 23 nt, artificial
  Oligomer
acagcuucuucuugaugacucgg

SEQ ID NO: 3265 - RNA, 23 nt, artificial
  Oligomer
cagcuucuucuugaugacucgga

SEQ ID NO: 3266 - RNA, 23 nt, artificial
  Oligomer
ggcgcaguaguucuuugcccacc

SEQ ID NO: 3267 - RNA, 23 nt, artificial
  Oligomer
gcgcaguaguucuuugcccaccu

SEQ ID NO: 3268 - RNA, 23 nt, artificial
  Oligomer
cgcaguaguucuuugcccaccug

SEQ ID NO: 3269 - RNA, 23 nt, artificial
  Oligomer
ugggggaaggcuuaaacgcagcu

SEQ ID NO: 3270 - RNA, 23 nt, artificial
  Oligomer
gggggaaggcuuaaacgcagcug

SEQ ID NO: 3271 - RNA, 23 nt, artificial
  Oligomer
ggggaaggcuuaaacgcagcugc

SEQ ID NO: 3272 - RNA, 23 nt, artificial
  Oligomer
gggaaggcuuaaacgcagcugcc

SEQ ID NO: 3273 - RNA, 23 nt, artificial
  Oligomer
ggaaggcuuaaacgcagcugcca

SEQ ID NO: 3274 - RNA, 23 nt, artificial
  Oligomer
gaaggcuuaaacgcagcugccag

SEQ ID NO: 3275 - RNA, 23 nt, artificial
  Oligomer
aaggcuuaaacgcagcugccagg

SEQ ID NO: 3276 - RNA, 23 nt, artificial
  Oligomer
gcugccuacaacaggucaguagu

SEQ ID NO: 3277 - RNA, 23 nt, artificial
  Oligomer
caccacuguuaacugucaguaac

SEQ ID NO: 3278 - RNA, 23 nt, artificial
  Oligomer
accacuguuaacugucaguaaca

SEQ ID NO: 3279 - RNA, 23 nt, artificial
  Oligomer
uucaugcuacaguacugaggggu

SEQ ID NO: 3280 - RNA, 23 nt, artificial
  Oligomer
ucaugcuacaguacugaggggua

SEQ ID NO: 3281 - RNA, 23 nt, artificial
  Oligomer
ucagguugaaguucaacacuccu

SEQ ID NO: 3282 - RNA, 23 nt, artificial
  Oligomer
agggucacugagcagcucgaagu

SEQ ID NO: 3283 - RNA, 23 nt, artificial
  Oligomer
gggucacugagcagcucgaaguc

SEQ ID NO: 3284 - RNA, 23 nt, artificial
  Oligomer
ggucacugagcagcucgaagucg

SEQ ID NO: 3285 - RNA, 23 nt, artificial
  Oligomer
gucacugagcagcucgaagucgg

SEQ ID NO: 3286 - RNA, 23 nt, artificial
  Oligomer
ucacugagcagcucgaagucggg

SEQ ID NO: 3287 - RNA, 23 nt, artificial
  Oligomer
cacacuuggucccuucagaccag

SEQ ID NO: 3288 - RNA, 23 nt, artificial
  Oligomer
caugcuacaguacugagggguau

SEQ ID NO: 3289 - RNA, 23 nt, artificial
  Oligomer
uucuugaugacucggaagccagu

SEQ ID NO: 3290 - RNA, 23 nt, artificial
  Oligomer
ucuugaugacucggaagccagug

SEQ ID NO: 3291 - RNA, 23 nt, artificial
  Oligomer
cuugaugacucggaagccagugc

SEQ ID NO: 3292 - RNA, 23 nt, artificial
  Oligomer
uugaugacucggaagccagugcu

SEQ ID NO: 3293 - RNA, 23 nt, artificial
  Oligomer
ugaugacucggaagccagugcuc

SEQ ID NO: 3294 - RNA, 23 nt, artificial
  Oligomer
cuggcuuaccaacuggcuaggca

SEQ ID NO: 3295 - RNA, 23 nt, artificial
  Oligomer
uaauacuugaacaucaaguguau

SEQ ID NO: 3296 - RNA, 23 nt, artificial
  Oligomer
aacgcagcugccagguguaauuu

SEQ ID NO: 3297 - RNA, 23 nt, artificial
  Oligomer
acgcagcugccagguguaauuuu

SEQ ID NO: 3298 - RNA, 23 nt, artificial
  Oligomer
gauacaaaacaaacaacaaacac

SEQ ID NO: 3299 - RNA, 23 nt, artificial
  Oligomer
auacaaaacaaacaacaaacaca

SEQ ID NO: 3300 - RNA, 23 nt, artificial
  Oligomer
caggaaucagucccucagcuccu

SEQ ID NO: 3301 - RNA, 23 nt, artificial
  Oligomer
aggaaucagucccucagcuccug

SEQ ID NO: 3302 - RNA, 23 nt, artificial
  Oligomer
aguucuuugcccaccuggcuuac

SEQ ID NO: 3303 - RNA, 23 nt, artificial
  Oligomer
guucuuugcccaccuggcuuacc

SEQ ID NO: 3304 - RNA, 23 nt, artificial
  Oligomer
uucuuugcccaccuggcuuacca

SEQ ID NO: 3305 - RNA, 23 nt, artificial
  Oligomer
gauggaagacccagauggcacuc

SEQ ID NO: 3306 - RNA, 23 nt, artificial
  Oligomer
auggaagacccagauggcacucc

SEQ ID NO: 3307 - RNA, 23 nt, artificial
  Oligomer
cacacauccagcuggaagccuug

SEQ ID NO: 3308 - RNA, 23 nt, artificial
  Oligomer
ucuuugcccaccuggcuuaccaa

SEQ ID NO: 3309 - RNA, 23 nt, artificial
  Oligomer
uccagguaagccgugucuuccuc

SEQ ID NO: 3310 - RNA, 23 nt, artificial
  Oligomer
cccgaagccacuguugcugcugu

SEQ ID NO: 3311 - RNA, 23 nt, artificial
  Oligomer
ccgaagccacuguugcugcuguc

SEQ ID NO: 3312 - RNA, 23 nt, artificial
  Oligomer
cgaagccacuguugcugcugucc

SEQ ID NO: 3313 - RNA, 23 nt, artificial
  Oligomer
gaagccacuguugcugcugucca

SEQ ID NO: 3314 - RNA, 23 nt, artificial
  Oligomer
aagccacuguugcugcuguccag

SEQ ID NO: 3315 - RNA, 23 nt, artificial
  Oligomer
caugcgucuguaagauagcugcc

SEQ ID NO: 3316 - RNA, 23 nt, artificial
  Oligomer
augcgucuguaagauagcugccu

SEQ ID NO: 3317 - RNA, 23 nt, artificial
  Oligomer
uccagcuggaagccuuguuggcc

SEQ ID NO: 3318 - RNA, 23 nt, artificial
  Oligomer
ccaccccuuccuacucuuacauu

SEQ ID NO: 3319 - RNA, 23 nt, artificial
  Oligomer
acacuuggucccuucagaccagu

SEQ ID NO: 3320 - RNA, 23 nt, artificial
  Oligomer
guuaacugucaguaacaaaaaua

SEQ ID NO: 3321 - RNA, 23 nt, artificial
  Oligomer
cuucuugaugacucggaagccag

SEQ ID NO: 3322 - RNA, 23 nt, artificial
  Oligomer
ugccagcucaacucugcaguaca

SEQ ID NO: 3323 - RNA, 23 nt, artificial
  Oligomer
ccaagugaucccugacacccacc

SEQ ID NO: 3324 - RNA, 23 nt, artificial
  Oligomer
caagugaucccugacacccaccc

SEQ ID NO: 3325 - RNA, 23 nt, artificial
  Oligomer
aagugaucccugacacccacccc

SEQ ID NO: 3326 - RNA, 23 nt, artificial
  Oligomer
ccgagcuguacagcuucuucuug

SEQ ID NO: 3327 - RNA, 23 nt, artificial
  Oligomer
aagggagaguuggcggagcuaaa

SEQ ID NO: 3328 - RNA, 23 nt, artificial
  Oligomer
agggagaguuggcggagcuaaac

SEQ ID NO: 3329 - RNA, 23 nt, artificial
  Oligomer
aggcgcaguaguucuuugcccac

SEQ ID NO: 3330 - RNA, 23 nt, artificial
  Oligomer
aaacgcagcugccagguguaauu

SEQ ID NO: 3331 - RNA, 23 nt, artificial
  Oligomer
uagguggcugccucaguuuucca

SEQ ID NO: 3332 - RNA, 23 nt, artificial
  Oligomer
ggaaucagucccucagcuccugc

SEQ ID NO: 3333 - RNA, 23 nt, artificial
  Oligomer
gaaucagucccucagcuccugcc

SEQ ID NO: 3334 - RNA, 23 nt, artificial
  Oligomer
aaucagucccucagcuccugccu

SEQ ID NO: 3335 - RNA, 23 nt, artificial
  Oligomer
ucuuaauacuugaacaucaagug

SEQ ID NO: 3336 - RNA, 23 nt, artificial
  Oligomer
cuuaauacuugaacaucaagugu

SEQ ID NO: 3337 - RNA, 23 nt, artificial
  Oligomer
uuaauacuugaacaucaagugua

SEQ ID NO: 3338 - RNA, 23 nt, artificial
  Oligomer
ccugccagcucaacucugcagua

SEQ ID NO: 3339 - RNA, 23 nt, artificial
  Oligomer
cugccagcucaacucugcaguac

SEQ ID NO: 3340 - RNA, 23 nt, artificial
  Oligomer
gggcguuugcugaugaacucaga

SEQ ID NO: 3341 - RNA, 23 nt, artificial
  Oligomer
gcuguuccgagcuguacagcuuc

SEQ ID NO: 3342 - RNA, 23 nt, artificial
  Oligomer
uugaaugggugugcgaacccgug

SEQ ID NO: 3343 - RNA, 23 nt, artificial
  Oligomer
gagcagcuguuccgagcuguaca

SEQ ID NO: 3344 - RNA, 23 nt, artificial
  Oligomer
agcagcuguuccgagcuguacag

SEQ ID NO: 3345 - RNA, 23 nt, artificial
  Oligomer
gcagcuguuccgagcuguacagc

SEQ ID NO: 3346 - RNA, 23 nt, artificial
  Oligomer
cagcuguuccgagcuguacagcu

SEQ ID NO: 3347 - RNA, 23 nt, artificial
  Oligomer
agcuguuccgagcuguacagcuu

SEQ ID NO: 3348 - RNA, 23 nt, artificial
  Oligomer
ucauccucagggucacugagcag

SEQ ID NO: 3349 - RNA, 23 nt, artificial
  Oligomer
ccaccuggcuuaccaacuggcua

SEQ ID NO: 3350 - RNA, 23 nt, artificial
  Oligomer
caccuggcuuaccaacuggcuag

SEQ ID NO: 3351 - RNA, 23 nt, artificial
  Oligomer
accuggcuuaccaacuggcuagg

SEQ ID NO: 3352 - RNA, 23 nt, artificial
  Oligomer
ccuggcuuaccaacuggcuaggc

SEQ ID NO: 3353 - RNA, 23 nt, artificial
  Oligomer
acgccagggcguuugcugaugaa

SEQ ID NO: 3354 - RNA, 23 nt, artificial
  Oligomer
ccagguaagccgugucuuccucc

SEQ ID NO: 3355 - RNA, 23 nt, artificial
  Oligomer
cagguaagccgugucuuccuccg

SEQ ID NO: 3356 - RNA, 23 nt, artificial
  Oligomer
agguaagccgugucuuccuccgg

SEQ ID NO: 3357 - RNA, 23 nt, artificial
  Oligomer
ccugggaaacacuauucccccac

SEQ ID NO: 3358 - RNA, 23 nt, Artificial
  Oligomer
cagcugcaucagguuggcacaca

SEQ ID NO: 3359 - RNA, 23 nt, artificial
  Oligomer
auuacaccuggcagcugcguuua

SEQ ID NO: 3360 - RNA, 23 nt, artificial
  Oligomer
aguugguaagccaggugggcaaa

SEQ ID NO: 3361 - RNA, 23 nt, Artificial
  Oligomer
uacagcucggaacagcugcucau

SEQ ID NO: 3362 - RNA, 23 nt, artificial
  Oligomer
uaaacgcagcugccagguguaau

SEQ ID NO: 3363 - RNA, 23 nt, artificial
  Oligomer
uuugcccaccuggcuuaccaacu

SEQ ID NO: 3364 - RNA, 23 nt, artificial
  Oligomer
augagcagcuguuccgagcugua

SEQ ID NO: 3365 - RNA, 19 nt, artificial
  Oligomer
ugaaaaauuacaccuggca

SEQ ID NO: 3366 - RNA, 19 nt, artificial
  Oligomer
gacacuugaaaaauuacac

SEQ ID NO: 3367 - RNA, 19 nt, artificial
  Oligomer
cacuugaaaaauuacaccu

SEQ ID NO: 3368 - RNA, 19 nt, artificial
  Oligomer
uuaggggccaacaaggcuu

SEQ ID NO: 3369 - RNA, 19 nt, artificial
  Oligomer
acacuugaaaaauuacacc

SEQ ID NO: 3370 - RNA, 19 nt, artificial
  Oligomer
acccugaggaugaacacuu

SEQ ID NO: 3371 - RNA, 19 nt, artificial
  Oligomer
guacugcagaguugagcug

SEQ ID NO: 3372 - RNA, 19 nt, artificial
  Oligomer
guguacugcagaguugagc

SEQ ID NO: 3373 - RNA, 19 nt, artificial
  Oligomer
guguguuuguuguuuguuu

SEQ ID NO: 3374 - RNA, 19 nt, artificial
  Oligomer
uugugugccaaccugaugc

SEQ ID NO: 3375 - RNA, 19 nt, artificial
  Oligomer
aucguguacugcagaguug

SEQ ID NO: 3376 - RNA, 19 nt, artificial
  Oligomer
ccaucguguacugcagagu

SEQ ID NO: 3377 - RNA, 19 nt, artificial
  Oligomer
acuugaaaaauuacaccug

SEQ ID NO: 3378 - RNA, 19 nt, artificial
  Oligomer
ugaggaugaacacuugugu

SEQ ID NO: 3379 - RNA, 19 nt, artificial
  Oligomer
accuggcagcugcguuuaa

SEQ ID NO: 3380 - RNA, 19 nt, artificial
  Oligomer
cagagacgacugaacuuuu

SEQ ID NO: 3381 - RNA, 19 nt, artificial
  Oligomer
aagacagagacgacugaac

SEQ ID NO: 3382 - RNA, 19 nt, artificial
  Oligomer
gcagcugcguuuaagccuu

SEQ ID NO: 3383 - RNA, 19 nt, artificial
  Oligomer
aggaagcucauugaguugu

SEQ ID NO: 3384 - RNA, 19 nt, artificial
  Oligomer
guguuucccaggaagcuca

SEQ ID NO: 3385 - RNA, 19 nt, artificial
  Oligomer
gacgacugaacuuuugggg

SEQ ID NO: 3386 - RNA, 19 nt, artificial
  Oligomer
acagagacgacugaacuuu

SEQ ID NO: 3387 - RNA, 19 nt, artificial
  Oligomer
aggaugaacacuugugugc

SEQ ID NO: 3388 - RNA, 19 nt, artificial
  Oligomer
cugaggaugaacacuugug

SEQ ID NO: 3389 - RNA, 19 nt, artificial
  Oligomer
ucugggucuuccaucuaga

SEQ ID NO: 3390 - RNA, 19 nt, artificial
  Oligomer
aucugggucuuccaucuag

SEQ ID NO: 3391 - RNA, 19 nt, artificial
  Oligomer
gaagggaccaaguguguuu

SEQ ID NO: 3392 - RNA, 19 nt, artificial
  Oligomer
aaggcuuaggggccaacaa

SEQ ID NO: 3393 - RNA, 19 nt, artificial
  Oligomer
uucccaggaagcucauuga

SEQ ID NO: 3394 - RNA, 19 nt, artificial
  Oligomer
ugggcaaagaacuacugcg

SEQ ID NO: 3395 - RNA, 19 nt, artificial
  Oligomer
ggugggcaaagaacuacug

SEQ ID NO: 3396 - RNA, 19 nt, artificial
  Oligomer
gugggcaaagaacuacugc

SEQ ID NO: 3397 - RNA, 19 nt, artificial
  Oligomer
ugccuagccaguugguaag

SEQ ID NO: 3398 - RNA, 19 nt, artificial
  Oligomer
aagccaggugggcaaagaa

SEQ ID NO: 3399 - RNA, 19 nt, artificial
  Oligomer
augccuagccaguugguaa

SEQ ID NO: 3400 - RNA, 19 nt, artificial
  Oligomer
uuccgagucaucaagaaga

SEQ ID NO: 3401 - RNA, 19 nt, artificial
  Oligomer
gacgcaugaauguaagagu

SEQ ID NO: 3402 - RNA, 19 nt, artificial
  Oligomer
uacagacgcaugaauguaa

SEQ ID NO: 3403 - RNA, 19 nt, artificial
  Oligomer
guguguagcauguaccuua

SEQ ID NO: 3404 - RNA, 19 nt, artificial
  Oligomer
acgcaugaauguaagagua

SEQ ID NO: 3405 - RNA, 19 nt, artificial
  Oligomer
aucuuacagacgcaugaau

SEQ ID NO: 3406 - RNA, 19 nt, artificial
  Oligomer
agacgcaugaauguaagag

SEQ ID NO: 3407 - RNA, 19 nt, artificial
  Oligomer
cuaucuuacagacgcauga

SEQ ID NO: 3408 - RNA, 19 nt, artificial
  Oligomer
gcaucacuacugaccuguu

SEQ ID NO: 3409 - RNA, 19 nt, artificial
  Oligomer
ggagcaucacuacugaccu

SEQ ID NO: 3410 - RNA, 19 nt, artificial
  Oligomer
augaaacaaaggcuuaggg

SEQ ID NO: 3411 - RNA, 19 nt, artificial
  Oligomer
agcuaucuuacagacgcau

SEQ ID NO: 3412 - RNA, 19 nt, artificial
  Oligomer
uaggcagcuaucuuacaga

SEQ ID NO: 3413 - RNA, 19 nt, artificial
  Oligomer
accuguuguaggcagcuau

SEQ ID NO: 3414 - RNA, 19 nt, artificial
  Oligomer
agcaucacuacugaccugu

SEQ ID NO: 3415 - RNA, 19 nt, artificial
  Oligomer
ucugaucggagcaucacua

SEQ ID NO: 3416 - RNA, 19 nt, artificial
  Oligomer
ugacaguuaacaguggugu

SEQ ID NO: 3417 - RNA, 19 nt, artificial
  Oligomer
cugacaguuaacaguggug

SEQ ID NO: 3418 - RNA, 19 nt, artificial
  Oligomer
guuacugacaguuaacagu

SEQ ID NO: 3419 - RNA, 19 nt, artificial
  Oligomer
uuguuacugacaguuaaca

SEQ ID NO: 3420 - RNA, 19 nt, artificial
  Oligomer
uacucacuguucaugaaua

SEQ ID NO: 3421 - RNA, 19 nt, artificial
  Oligomer
ucacuugggaucuuugaca

SEQ ID NO: 3422 - RNA, 19 nt, artificial
  Oligomer
acagacgcaugaauguaag

SEQ ID NO: 3423 - RNA, 19 nt, artificial
  Oligomer
cagcuaucuuacagacgca

SEQ ID NO: 3424 - RNA, 19 nt, artificial
  Oligomer
ucacuacugaccuguugua

SEQ ID NO: 3425 - RNA, 19 nt, artificial
  Oligomer
gagcaucacuacugaccug

SEQ ID NO: 3426 - RNA, 19 nt, artificial
  Oligomer
guguaucuuacuggucuga

SEQ ID NO: 3427 - RNA, 19 nt, artificial
  Oligomer
gugguuuguguaucuuacu

SEQ ID NO: 3428 - RNA, 19 nt, artificial
  Oligomer
acaguuaacagugguguga

SEQ ID NO: 3429 - RNA, 19 nt, artificial
  Oligomer
aacugaggcagccaccuaa

SEQ ID NO: 3430 - RNA, 19 nt, artificial
  Oligomer
uguucaugaauacacuuga

SEQ ID NO: 3431 - RNA, 19 nt, artificial
  Oligomer
cuguucaugaauacacuug

SEQ ID NO: 3432 - RNA, 19 nt, artificial
  Oligomer
agauacucacuguucauga

SEQ ID NO: 3433 - RNA, 19 nt, artificial
  Oligomer
cagacgcaugaauguaaga

SEQ ID NO: 3434 - RNA, 19 nt, artificial
  Oligomer
gcagcuaucuuacagacgc

SEQ ID NO: 3435 - RNA, 19 nt, artificial
  Oligomer
ggcagcuaucuuacagacg

SEQ ID NO: 3436 - RNA, 19 nt, artificial
  Oligomer
gguuuguguaucuuacugg

SEQ ID NO: 3437 - RNA, 19 nt, artificial
  Oligomer
gaggugguuuguguaucuu

SEQ ID NO: 3438 - RNA, 19 nt, artificial
  Oligomer
guggaggugguuuguguau

SEQ ID NO: 3439 - RNA, 19 nt, artificial
  Oligomer
uacugacaguuaacagugg

SEQ ID NO: 3440 - RNA, 19 nt, artificial
  Oligomer
guguagcauguaccuuauu

SEQ ID NO: 3441 - RNA, 19 nt, artificial
  Oligomer
aggugggcaaagaacuacu

SEQ ID NO: 3442 - RNA, 19 nt, artificial
  Oligomer
gugacccugaggaugaaca

SEQ ID NO: 3443 - RNA, 19 nt, artificial
  Oligomer
caggugggcaaagaacuac

SEQ ID NO: 3444 - RNA, 19 nt, artificial
  Oligomer
ccaggugggcaaagaacua

SEQ ID NO: 3445 - RNA, 19 nt, artificial
  Oligomer
auccaggggcuguuuagcu

SEQ ID NO: 3446 - RNA, 19 nt, artificial
  Oligomer
aagauccaggggcuguuua

SEQ ID NO: 3447 - RNA, 19 nt, artificial
  Oligomer
gcaugaaacaaaggcuuag

SEQ ID NO: 3448 - RNA, 19 nt, artificial
  Oligomer
agcaugaaacaaaggcuua

SEQ ID NO: 3449 - RNA, 19 nt, artificial
  Oligomer
uacuguagcaugaaacaaa

SEQ ID NO: 3450 - RNA, 19 nt, artificial
  Oligomer
uagcaugaaacaaaggcuu

SEQ ID NO: 3451 - RNA, 19 nt, artificial
  Oligomer
guagcaugaaacaaaggcu

SEQ ID NO: 3452 - RNA, 19 nt, artificial
  Oligomer
caguacuguagcaugaaac

SEQ ID NO: 3453 - RNA, 19 nt, artificial
  Oligomer
guacuguagcaugaaacaa

SEQ ID NO: 3454 - RNA, 19 nt, artificial
  Oligomer
ucaguacuguagcaugaaa

SEQ ID NO: 3455 - RNA, 19 nt, artificial
  Oligomer
uguagcaugaaacaaaggc

SEQ ID NO: 3456 - RNA, 19 nt, artificial
  Oligomer
acuguagcaugaaacaaag

SEQ ID NO: 3457 - RNA, 19 nt, artificial
  Oligomer
cuguagcaugaaacaaagg

SEQ ID NO: 3458 - RNA, 19 nt, artificial
  Oligomer
aguacuguagcaugaaaca

SEQ ID NO: 3459 - RNA, 19 nt, artificial
  Oligomer
ccucaguacuguagcauga

SEQ ID NO: 3460 - RNA, 19 nt, artificial
  Oligomer
cucaguacuguagcaugaa

SEQ ID NO: 3461 - RNA, 19 nt, artificial
  Oligomer
ugccagguguaauuuuuca

SEQ ID NO: 3462 - RNA, 19 nt, artificial
  Oligomer
guguaauuuuucaaguguc

SEQ ID NO: 3463 - RNA, 19 nt, artificial
  Oligomer
agguguaauuuuucaagug

SEQ ID NO: 3464 - RNA, 19 nt, artificial
  Oligomer
aagccuuguuggccccuaa

SEQ ID NO: 3465 - RNA, 19 nt, artificial
  Oligomer
gguguaauuuuucaagugu

SEQ ID NO: 3466 - RNA, 19 nt, artificial
  Oligomer
aaguguucauccucagggu

SEQ ID NO: 3467 - RNA, 19 nt, artificial
  Oligomer
cagcucaacucugcaguac

SEQ ID NO: 3468 - RNA, 19 nt, artificial
  Oligomer
gcucaacucugcaguacac

SEQ ID NO: 3469 - RNA, 19 nt, artificial
  Oligomer
aaacaaacaacaaacacac

SEQ ID NO: 3470 - RNA, 19 nt, artificial
  Oligomer
gcaucagguuggcacacaa

SEQ ID NO: 3471 - RNA, 19 nt, artificial
  Oligomer
caacucugcaguacacgau

SEQ ID NO: 3472 - RNA, 19 nt, artificial
  Oligomer
acucugcaguacacgaugg

SEQ ID NO: 3473 - RNA, 19 nt, artificial
  Oligomer
cagguguaauuuuucaagu

SEQ ID NO: 3474 - RNA, 19 nt, artificial
  Oligomer
acacaaguguucauccuca

SEQ ID NO: 3475 - RNA, 19 nt, artificial
  Oligomer
uuaaacgcagcugccaggu

SEQ ID NO: 3476 - RNA, 19 nt, artificial
  Oligomer
aaaaguucagucgucucug

SEQ ID NO: 3477 - RNA, 19 nt, artificial
  Oligomer
guucagucgucucugucuu

SEQ ID NO: 3478 - RNA, 19 nt, artificial
  Oligomer
aaggcuuaaacgcagcugc

SEQ ID NO: 3479 - RNA, 19 nt, artificial
  Oligomer
acaacucaaugagcuuccu

SEQ ID NO: 3480 - RNA, 19 nt, artificial
  Oligomer
ugagcuuccugggaaacac

SEQ ID NO: 3481 - RNA, 19 nt, artificial
  Oligomer
ccccaaaaguucagucguc

SEQ ID NO: 3482 - RNA, 19 nt, artificial
  Oligomer
aaaguucagucgucucugu

SEQ ID NO: 3483 - RNA, 19 nt, artificial
  Oligomer
gcacacaaguguucauccu

SEQ ID NO: 3484 - RNA, 19 nt, artificial
  Oligomer
cacaaguguucauccucag

SEQ ID NO: 3485 - RNA, 19 nt, artificial
  Oligomer
ucuagauggaagacccaga

SEQ ID NO: 3486 - RNA, 19 nt, artificial
  Oligomer
cuagauggaagacccagau

SEQ ID NO: 3487 - RNA, 19 nt, artificial
  Oligomer
aaacacacuuggucccuuc

SEQ ID NO: 3488 - RNA, 19 nt, artificial
  Oligomer
uuguuggccccuaagccuu

SEQ ID NO: 3489 - RNA, 19 nt, artificial
  Oligomer
ucaaugagcuuccugggaa

SEQ ID NO: 3490 - RNA, 19 nt, artificial
  Oligomer
cgcaguaguucuuugccca

SEQ ID NO: 3491 - RNA, 19 nt, artificial
  Oligomer
caguaguucuuugcccacc

SEQ ID NO: 3492 - RNA, 19 nt, artificial
  Oligomer
gcaguaguucuuugcccac

SEQ ID NO: 3493 - RNA, 19 nt, artificial
  Oligomer
cuuaccaacuggcuaggca

SEQ ID NO: 3494 - RNA, 19 nt, artificial
  Oligomer
uucuuugcccaccuggcuu

SEQ ID NO: 3495 - RNA, 19 nt, artificial
  Oligomer
uuaccaacuggcuaggcau

SEQ ID NO: 3496 - RNA, 19 nt, artificial
  Oligomer
ucuucuugaugacucggaa

SEQ ID NO: 3497 - RNA, 19 nt, artificial
  Oligomer
acucuuacauucaugcguc

SEQ ID NO: 3498 - RNA, 19 nt, artificial
  Oligomer
uuacauucaugcgucugua

SEQ ID NO: 3499 - RNA, 19 nt, artificial
  Oligomer
uaagguacaugcuacacac

SEQ ID NO: 3500 - RNA, 19 nt, artificial
  Oligomer
uacucuuacauucaugcgu

SEQ ID NO: 3501 - RNA, 19 nt, artificial
  Oligomer
auucaugcgucuguaagau

SEQ ID NO: 3502 - RNA, 19 nt, artificial
  Oligomer
cucuuacauucaugcgucu

SEQ ID NO: 3503 - RNA, 19 nt, artificial
  Oligomer
ucaugcgucuguaagauag

SEQ ID NO: 3504 - RNA, 19 nt, artificial
  Oligomer
aacaggucaguagugaugc

SEQ ID NO: 3505 - RNA, 19 nt, artificial
  Oligomer
aggucaguagugaugcucc

SEQ ID NO: 3506 - RNA, 19 nt, artificial
  Oligomer
cccuaagccuuuguuucau

SEQ ID NO: 3507 - RNA, 19 nt, artificial
  Oligomer
augcgucuguaagauagcu

SEQ ID NO: 3508 - RNA, 19 nt, artificial
  Oligomer
ucuguaagauagcugccua

SEQ ID NO: 3509 - RNA, 19 nt, artificial
  Oligomer
auagcugccuacaacaggu

SEQ ID NO: 3510 - RNA, 19 nt, artificial
  Oligomer
acaggucaguagugaugcu

SEQ ID NO: 3511 - RNA, 19 nt, artificial
  Oligomer
uagugaugcuccgaucaga

SEQ ID NO: 3512 - RNA, 19 nt, artificial
  Oligomer
acaccacuguuaacuguca

SEQ ID NO: 3513 - RNA, 19 nt, artificial
  Oligomer
caccacuguuaacugucag

SEQ ID NO: 3514 - RNA, 19 nt, artificial
  Oligomer
acuguuaacugucaguaac

SEQ ID NO: 3515 - RNA, 19 nt, artificial
  Oligomer
uguuaacugucaguaacaa

SEQ ID NO: 3516 - RNA, 19 nt, artificial
  Oligomer
uauucaugaacagugagua

SEQ ID NO: 3517 - RNA, 19 nt, artificial
  Oligomer
ugucaaagaucccaaguga

SEQ ID NO: 3518 - RNA, 19 nt, artificial
  Oligomer
cuuacauucaugcgucugu

SEQ ID NO: 3519 - RNA, 19 nt, artificial
  Oligomer
ugcgucuguaagauagcug

SEQ ID NO: 3520 - RNA, 19 nt, artificial
  Oligomer
uacaacaggucaguaguga

SEQ ID NO: 3521 - RNA, 19 nt, artificial
  Oligomer
caggucaguagugaugcuc

SEQ ID NO: 3522 - RNA, 19 nt, artificial
  Oligomer
ucagaccaguaagauacac

SEQ ID NO: 3523 - RNA, 19 nt, artificial
  Oligomer
aguaagauacacaaaccac

SEQ ID NO: 3524 - RNA, 19 nt, artificial
  Oligomer
ucacaccacuguuaacugu

SEQ ID NO: 3525 - RNA, 19 nt, artificial
  Oligomer
uuagguggcugccucaguu

SEQ ID NO: 3526 - RNA, 19 nt, artificial
  Oligomer
ucaaguguauucaugaaca

SEQ ID NO: 3527 - RNA, 19 nt, artificial
  Oligomer
caaguguauucaugaacag

SEQ ID NO: 3528 - RNA, 19 nt, artificial
  Oligomer
ucaugaacagugaguaucu

SEQ ID NO: 3529 - RNA, 19 nt, artificial
  Oligomer
ucuuacauucaugcgucug

SEQ ID NO: 3530 - RNA, 19 nt, artificial
  Oligomer
gcgucuguaagauagcugc

SEQ ID NO: 3531 - RNA, 19 nt, artificial
  Oligomer
cgucuguaagauagcugcc

SEQ ID NO: 3532 - RNA, 19 nt, artificial
  Oligomer
ccaguaagauacacaaacc

SEQ ID NO: 3533 - RNA, 19 nt, artificial
  Oligomer
aagauacacaaaccaccuc

SEQ ID NO: 3534 - RNA, 19 nt, artificial
  Oligomer
auacacaaaccaccuccac

SEQ ID NO: 3535 - RNA, 19 nt, artificial
  Oligomer
ccacuguuaacugucagua

SEQ ID NO: 3536 - RNA, 19 nt, artificial
  Oligomer
aauaagguacaugcuacac

SEQ ID NO: 3537 - RNA, 19 nt, artificial
  Oligomer
aguaguucuuugcccaccu

SEQ ID NO: 3538 - RNA, 19 nt, artificial
  Oligomer
uguucauccucagggucac

SEQ ID NO: 3539 - RNA, 19 nt, artificial
  Oligomer
guaguucuuugcccaccug

SEQ ID NO: 3540 - RNA, 19 nt, artificial
  Oligomer
uaguucuuugcccaccugg

SEQ ID NO: 3541 - RNA, 19 nt, artificial
  Oligomer
agcuaaacagccccuggau

SEQ ID NO: 3542 - RNA, 19 nt, artificial
  Oligomer
uaaacagccccuggaucuu

SEQ ID NO: 3543 - RNA, 19 nt, artificial
  Oligomer
cuaagccuuuguuucaugc

SEQ ID NO: 3544 - RNA, 19 nt, artificial
  Oligomer
uaagccuuuguuucaugcu

SEQ ID NO: 3545 - RNA, 19 nt, artificial
  Oligomer
uuuguuucaugcuacagua

SEQ ID NO: 3546 - RNA, 19 nt, artificial
  Oligomer
aagccuuuguuucaugcua

SEQ ID NO: 3547 - RNA, 19 nt, artificial
  Oligomer
agccuuuguuucaugcuac

SEQ ID NO: 3548 - RNA, 19 nt, artificial
  Oligomer
guuucaugcuacaguacug

SEQ ID NO: 3549 - RNA, 19 nt, artificial
  Oligomer
uuguuucaugcuacaguac

SEQ ID NO: 3550 - RNA, 19 nt, artificial
  Oligomer
uuucaugcuacaguacuga

SEQ ID NO: 3551 - RNA, 19 nt, artificial
  Oligomer
gccuuuguuucaugcuaca

SEQ ID NO: 3552 - RNA, 19 nt, artificial
  Oligomer
cuuuguuucaugcuacagu

SEQ ID NO: 3553 - RNA, 19 nt, artificial
  Oligomer
ccuuuguuucaugcuacag

SEQ ID NO: 3554 - RNA, 19 nt, artificial
  Oligomer
uguuucaugcuacaguacu

SEQ ID NO: 3555 - RNA, 19 nt, artificial
  Oligomer
ucaugcuacaguacugagg

SEQ ID NO: 3556 - RNA, 19 nt, Artificial
  Oligomer
uucaugcuacaguacugag

1. A compound having the structure:

| | |
|---|---|
| 5′ (N)ₓ-Z 3′ | (antisense strand) |
| 3′ Z′-(N′)_{y}-z″ 5′ | (sense strand) |

wherein each of N and N′ is a ribonucleotide which may be unmodified or modified, or an unconventional moiety;
wherein each of (N)x and (N′)y is an oligonucleotide in which each consecutive N or N′ is joined to the next N or N′ by a covalent bond;
wherein Z and Z′ may be present or absent, but if present is independently 1-5 consecutive nucleotides covalently attached at the 3′ terminus of the strand in which it is present;
wherein z″ may be present or absent, but if present is a capping moiety covalently attached at the 5′ terminus of (N′)y;
wherein each of x=y=19;
wherein (N)x comprises at least one 2′O Methyl sugar modified ribonucleotide;
wherein in (N′)y comprises a mirror nucleotide in at least one of the 3′ terminus or 3′ penultimate position; and
wherein the sequence of (N)x is set forth in any one of SEQ ID NO:16 and SEQ ID NO:1175.

2. The compound according to claim 1, wherein in (N′)y N′ at the 3′ terminus is a mirror nucleotide.

3. The compound according to claim 1, wherein in (N′)y N′ at the 3′ penultimate position is a mirror nucleotide.

4. The compound according to claim 1, wherein in (N)x the ribonucleotides alternate between 2′-O-Methyl sugar modified ribonucleotides and unmodified ribonucleotides and the ribonucleotide located at the middle of (N)x being unmodified.

5. The compound according to claim 1, wherein (N)x comprises at least five alternating unmodified ribonucleotides and 2′O methyl sugar modified ribonucleotides beginning at the 3′ end and at least nine 2′O methyl sugar modified ribonucleotides in total and each remaining N is an unmodified ribonucleotide.

6. The compound according to claim 1, wherein in (N)x 1-5 consecutive N at the 5′ terminus are 2′O Methyl sugar modified ribonucleotides and the remainder of the N are unmodified ribonucleotides.

7. A compound having the following structure:

| | |
|---|---|
| 5′ (N)ₓ-Z 3′ | (antisense strand) |
| 3′ Z′-(N′)_{y}-z″ 5′ | (sense strand) |

wherein each of N and N′ is a ribonucleotide which may be unmodified or modified, or an unconventional moiety;
wherein each of (N)x and (N′)y is an oligonucleotide in which each consecutive N or N′ is joined to the next N or N′ by a covalent bond;
wherein Z and Z′ may be present or absent, but if present is independently 1-5 consecutive nucleotides covalently attached at the 3′ terminus of the strand in which it is present;
wherein z″ may be present or absent, but if present is a capping moiety covalently attached at the 5′ terminus of (N′)y;
wherein each of x and y is independently an integer between 18 and 40;
wherein (N)x comprises at least one 2′O-Methyl sugar modified ribonucleotide;
wherein in (N′)y at least two consecutive ribonucleotides at one or more termini or starting from the penultimate position at one or more termini are mirror nucleotides or 2′-5′ bridged nucleotides; and
wherein the sequence of the ribonucleotide in (N′)y is identical to a sequence of identical length of consecutive ribonucleotides in an mRNA transcribed from the RTP801 gene and the sequence of (N)x is complementary to the sequence of (N′)y.

8. The compound according to claim 7, wherein the sequence of (N)x is an antisense sequence present in any one of Tables A-H.

9. The compound according to claim 7, wherein Z and Z′ are absent.

10. The compound according to claim 7, wherein x=y=19.

11. The compound according to claim 7, wherein
in (N)x the ribonucleotides alternate between 2′-O-methyl sugar modified ribonucleotides and unmodified ribonucleotides and the ribonucleotide located at the middle position of (N)x being unmodified; and
wherein (N′)y comprises unmodified ribonucleotides in which at least two consecutive nucleotides at the 3′ terminus are L-DNA nucleotides.

12. The compound according to claim 7, wherein
in (N)x the ribonucleotides alternate between 2′-O-methyl sugar modified ribonucleotides and unmodified ribonucleotides and the ribonucleotide located at the middle position of (N)x being unmodified; and
wherein (N′)y comprises unmodified ribonucleotides in which at least two consecutive nucleotides at the 3′ terminus are joined together by a 2′-5′ bridge.

13. The compound according to claim 7, wherein
in (N)x the ribonucleotides alternate between modified ribonucleotides and unmodified ribonucleotides each modified ribonucleotide being modified so as to have a 2′-O-methyl on its sugar and the ribonucleotide located at the middle position of (N)x being unmodified; and
wherein (N′)y comprises unmodified ribonucleotides in which at least two consecutive nucleotides starting at the penultimate position from the 3′ terminus are joined together by a 2′-5′ bridge.

14. The compound according to claim 13, wherein in (N′)y three consecutive nucleotides at the 3′ terminus are joined together by a 2′-5′ bridge.

15. The compounds according to claim 1, wherein the compound is phosphorylated or unphosphorylated at one or more termini.

16. A pharmaceutical composition comprising a compound according to claim 1 and a pharmaceutically acceptable carrier.

17. (canceled)

18. The method of claim 25, wherein the eye disease is selected from the group consisting of macular degeneration, glaucoma, diabetic retinopathy and diabetic macular edema.

19. The method of claim 25, wherein the respiratory disorder is selected from the group consisting of COPD, asthma, chronic bronchitis and emphysema.

20. The method of claim 25, wherein the microvascular disorder is acute renal failure.

21. The method of claim 25, wherein the neurodegenerative disease is selected from the group consisting of Alzheimer's disease, ALS and Parkinson's disease.

22. The method of claim 25, wherein the kidney disorder is selected from the group consisting of ARF and DGF.

23-24. (canceled)

25. A method for treating or preventing the incidence or severity of a disease or condition in a subject in need thereof wherein the disease or condition and/or symptoms associated therewith is selected from the group consisting of a respiratory disorder, an eye disease, a kidney disorder, a microvascular disorder, a hearing disorder, an ischemic condition, a spinal cord injury, or a neurodegenerative disease comprising administering to the subject a pharmaceutical composition according to claim 16 in an amount effective to treat the disease or condition.
